(19) United States
(12) Patent Application Publication
(10) Pub. No.: US 2017/0265516 A1
(43) Pub. Date: Sep. 21, 2017

(54) TOBACCO PROTEASE GENES

(71) Applicant: PHILIP MORRIS PRODUCTS S.A., Neuchatel (CH)

(72) Inventors: Lucien Bovet, La-chaux-de-Fon (CH); Dion Florack, Le Landeron (CH); James Battey, Neuchatel (CH)

(21) Appl. No.: 15/325,997

(22) PCT Filed: Jul. 16, 2015
(86) PCT No.: PCT/EP2015/066341

§ 371 Date: Jan. 12, 2017

(30) Foreign Application Priority Data
Jul. 18, 2014 (EP) 14177715.1

(51) Int. Cl. A24B 3/12; C12N 15/82; C12N 9/50; C12N 9/48; C12N 9/10

(52) U.S. Cl. CPC A24B 3/12; C12N 9/48; C12Y 304/23; C12Y 304/22; C12Y 304/21107; C12Y 304/24; C12N 9/104; C12Y 304/22002; C12N 9/1029; C12Y 304/21112; C12N 9/63; C12Y 203/02002; C12Y 203/01091; C12N 15/8242; C12N 15/8201; C12N 15/8213

(57) ABSTRACT

The invention provides protease genes which are regulated in a specific manner during curing of tobacco plants material and which affect the flavour of cured tobacco.

### FIELD OF THE INVENTION

[0001] The present invention concerns the use of proteases expressed in tobacco to alter the characteristics of cured tobacco products. In particular, the invention provides processes for altering the curing of tobacco leaf and modulating tobacco leaf composition by modulating the expression of one or more tobacco protease genes.

### BACKGROUND OF THE INVENTION

[0002] Tobacco curing is a process of physical and biochemical changes that bring out the aroma and flavor of each variety of tobacco. After tobacco has been harvested, it is necessary to cure it and then age it before consumption, to improve its flavour. There are four common methods of curing, and the method used depends on the type of tobacco and its intended use.

[0003] Air-cured tobacco is sheltered from wind and sun in a well-ventilated chamber, where it air-dries for six to eight weeks. Air-cured tobacco is low in sugar, which gives the tobacco smoke a light, sweet flavor, and high in nicotine. Cigar and burley tobaccos are air cured. In fire curing, smoke from a low-burning fire permeates the leaves. This gives the leaves a distinctive smokey aroma and flavour. Fire curing takes three to ten weeks and produces a tobacco low in sugar and high in nicotine. Pipe tobacco, chewing tobacco, and snuff are fire cured.

[0004] Flue-cured tobacco is kept in an enclosed heated area, but it is not directly exposed to smoke. This method produces cigarette tobacco that is high in sugar and has medium to high levels of nicotine. It is the fastest method of curing, requiring about a week. Virginia tobacco that has been flue cured is also called bright tobacco, because flue curing turns its leaves gold, orange, or yellow.

[0005] Sun-cured tobacco dries uncovered in the sun. This method is used in Turkey, Greece and other Mediterranean countries to produce oriental tobacco. Sun-cured tobacco is low in sugar and nicotine and is used in cigarettes.

[0006] Curing produces various compounds in the tobacco leaves that give cured tobacco its specific flavour and taste, such as for example a sweet hay, tea, rose oil, or fruity aromatic flavor.

[0007] During the first phase of curing, corresponding to the so-called yellowing phase and also known as color curing, the chlorophyll content is reduced. This phase takes between 2 and 8 days depending on the tobacco type. During this phase leaf metabolic activities are drastically changed. Not only is chlorophyll degraded but also, for example, starch and proteins.

[0008] To date, the only methods for altering the curing process which have been proposed are base on altering the actual conditions to which the tobacco is exposed in the chosen curing procedure. Very little is known about gene expression in tobacco during curing, and moreover few data have been reported on the activities of proteases in tobacco leaf and their resulting products.

[0009] We have identified 80 protease genes that are activated during leaf curing in the three main tobacco types, Burley, Virginia and Oriental. We have found that specific protease expression is associated with particular flavour profiles in tobacco.

### SUMMARY OF THE INVENTION

[0010] 80 protease genes (SEQ ID NO: 1-80) were identified that are up-regulated in Burley tobacco upon air curing, Virginia tobacco upon flue-curing and Oriental tobacco upon sun curing. Details on such up-regulation in one or more of the different tobacco types are summarised in FIG. 2 and Table 1 & 2.

[0011] Such gene sequences and their regulatory sequences can be used to modulate or modify protease activity during curing. The polynucleotide sequences SEQ ID NO: 1-80 include exon and intron sequences. The protein sequences relating to the coding sequence part of the polynucleotide sequences SEQ ID NO: 1-80, are depicted in SEQ ID NO: 81-160.

[0012] Accordingly, there is provided a mutant, non-naturally occurring or transgenic tobacco plant cell comprising:
[0013] (i) a polynucleotide comprising, consisting or consisting essentially of a sequence encoding a functional protease and having at least 95% sequence identity to any one of SEQ ID NO:1 to SEQ ID No: 80;
[0014] (ii) a polypeptide encoded by the polynucleotide set forth in (i);
[0015] (iii) a polypeptide comprising, consisting or consisting essentially of a sequence encoding a protease and having at least 95% sequence identity to SEQ ID NO:81 to SEQ ID No: 160; or
[0016] (iv) a construct, vector or expression vector comprising the isolated polynucleotide set forth in (i),

[0017] and wherein the expression or activity of said protease is modulated as compared to a control tobacco plant cell in which the expression or activity of said protease has not been altered.

[0018] Alteration of protease expression in tobacco cells during the curing process imparts different flavours to the cured tobacco and products manufactured therefrom. The effects of different genes on different tobacco flavour profiles are further discussed below.

[0019] In embodiments, the expression or activity of said protease is upregulated compared to the control tobacco plant cell. However, in certain embodiments, the expression or activity of said protease is downregulated compared to the control tobacco plant cell. In still further embodiments, at least one protease can be upregulated at the same time as at least one protease is downregulated in the same cell.

[0020] In an exemplary embodiment, therefore, there is provided a mutant, non-naturally occurring or transgenic tobacco plant cell according to any preceding claim, wherein the expression or activity is modulated of a protease selected from:

[0021] at least one of SEQ ID NO: 1 to 16; or

[0022] at least one of SEQ ID NO: 30 to 41; or

[0023] at least one of SEQ ID NO: 17 to 22; or

[0024] at least one of SEQ ID NO: 42 to 44; or

[0025] at least one of SEQ ID NO: 45 to 61; or

[0026] at least one of SEQ ID NO: 62 to 80 or

[0027] at least one of SEQ ID NO: 23 to 29.

[0028] In a specific embodiment, there is provided a mutant, non-naturally occurring or transgenic tobacco plant cell according to claim 4, wherein the expression or activity of a protease selected from at least one of SEQ ID NO: 30 to 41 is modulated in an Oriental type tobacco.

[0029] In a specific embodiment, there is provided a mutant, non-naturally occurring or transgenic tobacco plant cell according to claim 4, wherein the expression or activity of a protease selected from SEQ ID NO: 17 to 22 is modulated in a Virginia type tobacco.

[0030] In a specific embodiment, there is provided a mutant, non-naturally occurring or transgenic tobacco plant cell according to claim 4, wherein the expression or activity of a protease selected from at least one of SEQ ID NO: 42 to 44 is modulated in a Burley type tobacco.

[0031] In a specific embodiment, there is provided a mutant, non-naturally occurring or transgenic tobacco plant cell according to claim 4, wherein the expression or activity of a protease selected from at least one of SEQ ID NO: 45 to 61 is modulated in a Virginia or Oriental type tobacco.

[0032] In a specific embodiment, there is provided a non-naturally occurring or transgenic tobacco plant cell according to claim 4, wherein the expression or activity of a protease selected from at least one of SEQ ID NO: 62 to 80 is modulated in a Burley or Oriental type tobacco.

[0033] In a specific embodiment, there is provided a mutant, non-naturally occurring or transgenic tobacco plant cell according to claim 4, wherein the expression or activity of a protease selected from at least one of SEQ ID NO: 23 to 29 is modulated in a Burley or Virginia type tobacco.

[0034] The mutant, non-naturally occurring or transgenic tobacco plant cell can be a tobacco plant cell wherein said mutation(s) is a heterozygous or homozygous mutation.

[0035] In embodiments of the invention, the expression of the one or more proteases is increased by about 10% to about 1000%, for example by at least 10%, at least 20%, at least 25%, at least 50%, at least 100%, at least 200%, at least 500%, at least 750% or up to 1000%.

[0036] In a second aspect, there is provided a mutant, non-naturally occurring or transgenic plant or component or part thereof comprising the plant cell according to the preceding aspect of the invention.

[0037] In a third aspect, there is provided plant material including biomass, seed, stem, flowers or leaves from the plant of the second aspect of the invention.

[0038] In a fourth aspect, there is provided a method for preparing a tobacco plant with modulated levels of protease, said method comprising the steps of:

[0039] (a) providing a plant comprising (i) a polynucleotide comprising, consisting or consisting essentially of a sequence encoding a functional protease and having at least 95% sequence identity to at least one of SEQ ID NO:1 to SEQ ID No: 80;

[0040] (b) inserting one or more mutations into said polynucleotide of said tobacco plant to create a mutant tobacco plant; and

[0041] (c) curing the tobacco plant material.

[0042] In some embodiments, the tobacco plant in step (b) is a mutant tobacco plant, preferably, wherein said mutant tobacco plant comprises one or more mutations in one or more further sequence encoding a functional protease and having at least 95% sequence identity to at least one of SEQ ID NO:1 to SEQ ID No: 80. Thus, a plant can be constructed in which one or more cells comprise multiple mutated proteases.

[0043] The mutated cells comprising modulated protease expression or activity are impart a different flavour profile to tobacco leaf during the curing process. By replicating a leaf chemistry of one tobacco type in another, it is possible to transfer flavour characteristics to a tobacco type which does not normally possess those characteristics.

[0044] In embodiments, the genome of a cell of a tobacco plant is modified by a genome editing technology or by genome engineering techniques selected from CRISPR/Cas technology, zinc finger nuclease-mediated mutagenesis, chemical or radiation mutagenesis, homologous recombination, oligonucleotide-directed mutagenesis and meganuclease-mediated mutagenesis.

[0045] In a further aspect, therefore, there is provided a method for producing cured plant material, preferably cured leaves, or flowers with an altered flavour profile as compared to control plant material comprising the steps of:

[0046] (a) providing a plant or the plant material according to the foregoing aspects of the invention;

[0047] (b) optionally harvesting the plant material therefrom; and

[0048] (c) curing the plant material for a period of time such that the levels of at least one protease are modulated compared to control cured plant material.

[0049] In a still further aspect, there is provided use of
[0050] (i) a polynucleotide comprising, consisting or consisting essentially of a sequence encoding a functional protease and having at least 95% sequence identity to any one of SEQ ID NO:1 to SEQ ID No: 80;
[0051] (ii) a polypeptide encoded by the polynucleotide set forth in (i);
[0052] (iii) a polypeptide comprising, consisting or consisting essentially of a sequence encoding a protease and having at least 95% sequence identity to SEQ ID NO:81 to SEQ ID No: 160; or
[0053] (iv) a construct, vector or expression vector comprising the isolated polynucleotide set forth in (i),
[0054] for the modulation of the expression or activity of one or more proteases in tobacco during a tobacco curing procedure.

[0055] The curing procedure in according to this aspect of the invention can be selected from the group consisting of air curing, fire curing, smoke curing and flue curing.

[0056] Modification or modulation of protease activity during curing can be through (further) up-regulation or down-regulation. Modification or modulation can be through genetic engineering using for example certain promoter sequences that are (at least) active during such curing. Modulation can also be through for example mutagenesis as claimed above, of such sequences and/or their regulatory region resulting in either up- or down-regulation, or complete knock-out, of the protease activity encoded thereby under the respective curing conditions.

[0057] In another embodiment there is provided the use of at least one of the 16 gene sequences SEQ ID NO: 1 to 16 (see Table 2), and sequences comprising, consisting or consisting essentially of a sequence having at least 95% sequence identity to one or more of said 16 sequences that are up-regulated in all three types of tobacco during curing for modifying the flavour of cured tobacco.

[0058] In another embodiment there is provided the use of at least one of the 12 gene sequences SEQ ID NO: 30 to 41, and sequences comprising, consisting or consisting essentially of a sequence having at least 95% sequence identity to one or more of said 12 sequences that are up-regulated both in air-cured Burley and flue-cured Virginia, in an Oriental type tobacco to modify the flavour of said tobacco during curing.

[0059] In another embodiment there is provided the use of at least one of the 6 gene sequences SEQ ID NO: 17 to 22, and sequences comprising, consisting or consisting essentially of a sequence having at least 95% sequence identity to one or more of said 6 sequences, that are up-regulated both in air-cured Burley and sun-cured Oriental, in a Virginia type tobacco to modify the flavour of said tobacco during curing.

[0060] In another embodiment there is provided the use of at least one of the 3 gene sequences SEQ ID NO: 42 to 44, and sequences comprising, consisting or consisting essentially of a sequence having at least 95% sequence identity to one or more of said 3 sequences that are up-regulated in both flue-cured Virginia and sun-cured Oriental tobacco, to modify the flavour of a Burley type tobacco during curing.

[0061] In another embodiment there is provided the use of at least one of the 17 gene sequences SEQ ID NO: 45 to 61, and sequences comprising, consisting or consisting essentially of a sequence having at least 95% sequence identity to one or more of said 17 sequences, that are uniquely up-regulated in air-cured Burley, to modify the flavour in a Virginia or Oriental type tobacco during curing.

[0062] In another embodiment there is provided the use of at least one of the 19 gene sequences SEQ ID NO: 62 to 80, and sequences comprising, consisting or consisting essentially of a sequence having at least 95% sequence identity to one or more of said 19 sequences, that are uniquely up-regulated in flue-cured Virginia, to modify the flavour in a Burley or Oriental type tobacco during curing.

[0063] In another embodiment there is provided the use of at least one of the 7 gene sequences SEQ ID NO: 23 to 29, and sequences comprising, consisting or consisting essentially of a sequence having at least 95% sequence identity to one or more of said 7 sequences, that are uniquely up-regulated in sun-cured Oriental, to modify the flavour of a Burley or Virginia type tobacco during curing.

[0064] As certain gene sequences are only up-regulated in one or two of the three tobacco types (as defined according to tobacco type and curing method), certain gene sequences can potentially be used to modify or modulate protease activity during curing such that the outcome with respect to leaf chemistry (for example the metabolite content of cell) and properties of the obtained tobacco leaf cell, are changed such that for example an air-cured Burley tobacco acquires certain characteristics of a flue-cured Virginia-type tobacco or sun-cured Oriental tobacco upon curing. This for example can be done by modulating the expression of one or more of the gene sequences that are up-regulated in one or two of tobacco types and not in the other tobacco. For example, 17 gene sequences are uniquely up-regulated in air-cured Burley, 19 in flue-cured Virginia, and 12 in both types of tobacco during curing. By selectively modulating one or more of the 19 gene sequences that are only up-regulated in air-cured Burley now in flue-cured Virginia, the leaf cell composition of the sun-cured Virginia tobacco upon curing can be altered towards a more Burley type. Using a genetic engineering approach this can be achieved using for example a promoter sequence that is active under the curing conditions of the targeted tobacco type. Promoter sequences of use therefore are for example the regulatory sequences driving the expression of the gene sequences listed here. Using a mutagenesis, genome editing or engineering approach, the mutated gene sequence can be active under the curing conditions of the targeted tobacco type.

[0065] In one example, a regulatory sequence is mutated such that the gene sequence downstream is active under the desired curing conditions. For example, by selectively modifying or modulating the expression of one or more of the 19 sequences that are uniquely up-regulated in flue-cured Virginia in an air-cured Burley type of tobacco, the leaf cell composition of the Burley type tobacco upon curing can be altered towards a more Virginia type. Also, by selectively modulating the expression of one or more of the 12 sequences that are up-regulated both in air-cured Burley and flue-cured Virginia, in a sun-cured Oriental tobacco, the leaf cell composition of the sun-cured Oriental tobacco upon curing can be altered such that it acquires Burley and Virginia characteristics.

[0066] In one embodiment, one of the gene sequences listed in SEQ ID Nos: 1-80 or sequences comprising, consisting or consisting essentially of a sequence having at least 95% sequence identity to one or more of the listed sequences, is up-regulated. In another embodiment more than one of the gene sequences listed in SEQ ID Nos: 1-80 or sequences comprising, consisting or consisting essentially of a sequence having at least 95% sequence identity to such sequences, are up-regulated. In another embodiment, one or more of the gene sequences listed in SEQ ID Nos: 1-80 or sequences comprising, consisting or consisting essentially of a sequence having at least 95% sequence identity to such listed sequences, are down-regulated. In another embodiment one or more of sequences listed in SEQ ID Nos: 1-80 or sequences comprising, consisting or consisting essentially of a sequence having at least 95% sequence identity to such listed sequences are up-regulated, and one or more sequences listed in SEQ ID Nos: 1-80 or sequences comprising, consisting or consisting essentially of a sequence having at least 95% sequence identity to such listed sequences are down-regulated.

[0067] As curing conditions determine the ultimate leaf cell chemistry, such modification or modulation affects the way a consumer experiences a product made from such leaf material. Hence, the invention also provides tobacco leaves and products comprising such leaves, obtained according to the methods claimed above. Such products include but are not limited to chewing tobacco, tobacco sticks, extracts obtained therefrom and other smoking articles comprising such leaf material or a material derived therefrom.

### BRIEF DESCRIPTION OF THE DRAWINGS

[0068] FIG. 1. Expression of CYP82E4 (AGD93125.1/GI:444237502) increased after 48 h curing in the three main tobacco types, SC, sun-cured; FC, flue-cured; AC, air-cured.

[0069] FIG. 2. The expression of 80 senescence-activated protease genes increased in the three main tobacco types

[0070] FIG. 3. One APA1 tobacco gene (SEQ 68) is only expressed during Virginia Curing.

### DEFINITIONS

[0071] The technical terms and expressions used within the scope of this application are generally to be given the meaning commonly applied to them in the pertinent art of plant and molecular biology. All of the following term definitions apply to the complete content of this application. The word “comprising” does not exclude other elements or steps, and the indefinite article “a” or “an” does not exclude a plurality. A single step may fulfil the functions of several features recited in the claims. The terms “about”, “essentially” and “approximately” in the context of a given numerate value or range refers to a value or range that is within 20%, within 10%, or within 5%, 4%, 3%, 2% or 1% of the given value or range.

[0072] The term “isolated” refers to any entity that is taken from its natural milieu, but the term does not connote any degree of purification.

[0073] An “expression vector” is a nucleic acid vehicle that comprises a combination of nucleic acid components for enabling the expression of nucleic acid. Suitable expression vectors include episomes capable of extra-chromosomal replication such as circular, double-stranded nucleic acid plasmids; linearized double-stranded nucleic acid plasmids; and other functionally equivalent expression vectors of any origin. An expression vector comprises at least a promoter positioned upstream and operably-linked to a nucleic acid, nucleic acid constructs or nucleic acid conjugate, as defined below.

[0074] The term “construct” refers to a double-stranded, recombinant nucleic acid fragment comprising one or more polynucleotides. The construct comprises a “template strand” base-paired with a complementary “sense or coding strand.” A given construct can be inserted into a vector in two possible orientations, either in the same (or sense) orientation or in the reverse (or anti-sense) orientation with respect to the orientation of a promoter positioned within a vector—such as an expression vector.

[0075] A “vector” refers to a nucleic acid vehicle that comprises a combination of nucleic acid components for enabling the transport of nucleic acid, nucleic acid constructs and nucleic acid conjugates and the like. Suitable vectors include episomes capable of extra-chromosomal replication such as circular, double-stranded nucleic acid plasmids; linearized double-stranded nucleic acid plasmids; and other vectors of any origin.

[0076] A “promoter” refers to a nucleic acid element/sequence, typically positioned upstream and operably-linked to a double-stranded DNA fragment. Promoters can be derived entirely from regions proximate to a native gene of interest, or can be composed of different elements derived from different native promoters or synthetic DNA segments.

[0077] The terms “homology, identity or similarity” refer to the degree of sequence similarity between two polypeptides or between two nucleic acid molecules compared by sequence alignment. The degree of homology between two discrete nucleic acid sequences being compared is a function of the number of identical, or matching, nucleotides at comparable positions. The percent identity may be determined by visual inspection and mathematical calculation. Alternatively, the percent identity of two nucleic acid sequences may be determined by comparing sequence information using a computer program such as—ClustalW, BLAST, FASTA or Smith-Waterman.

[0078] A “variant” means a substantially similar sequence. A variant can have a similar function or substantially similar function as a wild-type sequence. For a protease, a similar function is at least about 50%, 60%, 70%, 80% or 90% of wild-type enzyme function under the same conditions. For a protease, a substantially similar function is at least about 90%, 95%, 96%, 97%, 98% or 99% of wild-type enzyme function under the same conditions. For example, wild-type protease sequences are set forth in SEQ ID Nos: 81-160. The variants can have one or more mutations that result in the enzyme having a reduced level of protease activity as compared to the wild-type protease. The variants can have one or more mutations that result in their protease activity being knocked out (i.e. a 100% inhibition, and thus a non-functional polypeptide). Variants can also have increased activity, leading to a more active protease enzyme function.

[0079] The term “plant” refers to any plant or part of a plant at any stage of its life cycle or development, and its progenies. In one embodiment, the plant is a “tobacco plant”, which refers to a plant belonging to the genus Nicotiana. Preferred species of tobacco plant are described herein.

[0080] “Plant parts” include plant cells, plant protoplasts, plant cell tissue cultures from which a whole plant can be regenerated, plant calli, plant clumps and plant cells that are intact in plants or parts of plants such as embryos, pollen, anthers, ovules, seeds, leaves, flowers, stems, branches, fruit, roots, root tips and the like. Progeny, variants and mutants of regenerated plants are also included within the scope of the disclosure, provided that they comprise the introduced polynucleotides described herein.

[0081] A “plant cell” refers to a structural and physiological unit of a plant. The plant cell may be in the form of a protoplast without a cell wall, an isolated single cell or a cultured cell, or as a part of higher organized unit such as but not limited to, plant tissue, a plant organ, or a whole plant.

[0082] The term “plant material” refers to any solid, liquid or gaseous composition, or a combination thereof, obtainable from a plant, including biomass, leaves, stems, roots, flowers or flower parts, fruits, pollen, egg cells, zygotes, seeds, cuttings, secretions, extracts, cell or tissue cultures, or any other parts or products of a plant. In one embodiment, the plant material comprises or consists of biomass, stem, seed or leaves. In another embodiment, the plant material comprises or consists of leaves.

[0083] The term “variety” refers to a population of plants that share constant characteristics which separate them from other plants of the same species. While possessing one or more distinctive traits, a variety is further characterized by a very small overall variation between individuals within that variety. A variety is often sold commercially.

[0084] A “type” of tobacco is defined by origin and curing method. Flue-cured tobacco, which accounts for 40% of global production, is also known as “Bright” and “Virginia” tobacco. It is used almost entirely in cigarette blends. Some of the heavier leaves may be used in mixtures for pipe smoking. Some English cigarettes are 100% flue-cured. Flue-cured leaf is characterized by a high sugar:nitrogen ratio. This ratio is enhanced by the picking of the leaf in an advanced stage of ripeness, and by the unique curing process which allows certain chemical changes to occur in the leaf. Cured leaves vary from lemon to orange to mahogany in colour.

[0085] Burley is light air-cured type derived from the White Burley which arose as a mutant on a farm in Ohio in 1864. Burley is used primarily in cigarette blends. Some of the heavier leaf is sued in pipe blends and also for chewing.

[0086] Cured burley leaf is characterized by low sugar content and a very low sugar to nitrogen ratio (high nicotine). This is enhanced by high Nitrogen fertilizer, harvesting at an early stage of senescence, and the air curing process which allows oxidation of any sugars which may have occurred.

[0087] Maryland is another light air-cured type. It is used to some extent in American blended cigarettes and to a greater extent in certain Swiss cigarette blends.

[0088] Maryland tobacco is extremely fluffy, has good burning properties, low nicotine, and neutral aroma.

[0089] Dark air-cured tobacco encompasses a number of types used mainly for chewing, snuff, cigar, and pipe blends. Most of the world production is confined to the tropics.

[0090] Oriental tobacco gives a mild smoke with very characteristic aroma. Resins, waxes and gum exuded by glandular hairs (trichomes) furnish the aroma. Nicotine is low averaging around 1.0%.

[0091] Dark-fired tobacco is used in the production of snuff, chewing tobacco, and pipe blends. Dark-fired leaves are subjected to smoke from smoldering wood during the early stage of curing. The type of wood used is very important in determining taste and grown. Cured leaves are very dark in color and are long and heavy bodied.

[0092] The term “modulating” may refer to reducing, inhibiting, increasing or otherwise affecting the expression or activity of a polypeptide. The term may also refer to reducing, inhibiting, increasing or otherwise affecting the activity of a gene encoding a polypeptide which can include, but is not limited to, modulating transcriptional activity.

[0093] The term “reduce” or “reduced” as used herein, refers to a reduction of from about 10% to about 99%, or a reduction of at least 10%, at least 20%, at least 25%, at least 30%, at least 40%, at least 50%, at least 60%, at least 70%, at least 75%, at least 80%, at least 90%, at least 95%, at least 98%, at least 99%, or at least 100% or more of a quantity or an activity, such as but not limited to polypeptide activity, transcriptional activity and protein expression. The term “inhibit” or “inhibited” as used herein, refers to a reduction of from about 98% to about 100%, or a reduction of at least 98%, at least 99%, but particularly of 100%, of a quantity or an activity, such as but not limited to polypeptide activity, transcriptional activity and protein expression.

[0094] The term “increase” or “increased” as used herein, refers to an increase of from about 5% to about 99%, or an increase of at least 5%, at least 10%, at least 20%, at least 25%, at least 30%, at least 40%, at least 50%, at least 60%, at least 70%, at least 75%, at least 80%, at least 90%, at least 95%, at least 98%, at least 99%, at least 100%, at least 500% or at least 1000% or more of a quantity or an activity, such as but not limited to polypeptide activity, transcriptional activity and protein expression.

[0095] The term “control” in the context of a control plant means a plant or plant cell in which the expression or activity of an enzyme has not been modified (for example, increased or reduced) and so it can provide a comparison with a plant in which the expression or activity of the enzyme has been modified. The control plant may comprise an empty vector. The control plant or plant cell may correspond to a wild-type plant or wild-type plant cell. For example, the control plant or plant cell can be the same genotype as the starting material for the genetic alteration that resulted in the subject plant. In all such cases, the subject plant and the control plant are cultured and harvested using the same protocols for comparative purposes. Changes in levels, ratios, activity, or distribution of the genes or polypeptides described herein, or changes in tobacco plant phenotype, particularly reduced production of proteases, can be measured by comparing a subject plant to the control plant, where the subject plant and the control plant have been cultured, harvested and cured using the same protocols. The control plant can provide a reference point for measuring changes in phenotype of the subject plant. The measurement of changes in phenotype can be measured at any time in a plant, including during plant development, senescence, or preferably after curing. Measurement of changes in phenotype can be measured in plants grown under any conditions, including from plants grown in growth chamber, greenhouse, or in a field. Changes in phenotype can be measured by determining the expression or activity of proteases identified herein in SEQ ID Nos 81-160.

### DETAILED DESCRIPTION

[0096] In one embodiment, there is provided an isolated polynucleotide comprising, consisting or consisting essentially of a polynucleotide sequence having at least 95% sequence identity to any of the sequences described herein, including any of polynucleotides shown in the sequence listing. Suitably, the isolated polynucleotide comprises, consists or consists essentially of a sequence having at least 95%, 96%, 97%, 98%, 99% or 100% sequence identity thereto.

[0097] Suitably, the polynucleotide(s) described herein encode a protein with protease activity that is at least about 50%, 60%, 70%, 80%, 90% 95%, 96%, 97%, 98%, 99% 100% or more of the activity of the protein set forth in SEQ ID NOs: 81-160.

[0098] A polynucleotide as described herein can include a polymer of nucleotides, which may be unmodified or modified deoxyribonucleic acid (DNA) or ribonucleic acid (RNA). Accordingly, a polynucleotide can be, without limitation, a genomic DNA, complementary DNA (cDNA), mRNA, or antisense RNA or a fragment(s) thereof. Moreover, a polynucleotide can be single-stranded or double-stranded DNA, DNA that is a mixture of single-stranded and double-stranded regions, a hybrid molecule comprising DNA and RNA, or a hybrid molecule with a mixture of single-stranded and double-stranded regions or a fragment(s) thereof. In addition, the polynucleotide can be composed of triple-stranded regions comprising DNA, RNA, or both or a fragment(s) thereof. A polynucleotide can contain one or more modified bases, such as phosphothioates, and can be a peptide nucleic acid. Generally, polynucleotides can be assembled from isolated or cloned fragments of cDNA, genomic DNA, oligonucleotides, or individual nucleotides, or a combination of the foregoing. Although the polynucleotide sequences described herein are shown as DNA sequences, the sequences include their corresponding RNA sequences, and their complementary (for example, completely complementary) DNA or RNA sequences, including the reverse complements thereof.

[0099] A polynucleotide as described herein will generally contain phosphodiester bonds, although in some cases, polynucleotide analogues are included that may have alternate backbones, comprising, for example, phosphoramidate, phosphorothioate, phosphorodithioate, or O-methylphophoroamidite linkages; and peptide polynucleotide backbones and linkages. Other analogue polynucleotides include those with positive backbones; non-ionic backbones, and non-ribose backbones. Modifications of the ribose-phosphate backbone may be done for a variety of reasons, for example, to increase the stability and half-life of such molecules in physiological environments or as probes on a biochip. Mixtures of naturally occurring polynucleotides and analogues can be made; alternatively, mixtures of different polynucleotide analogues, and mixtures of naturally occurring polynucleotides and analogues may be made.

[0100] A variety of polynucleotide analogues are known, including, for example, phosphoramidate, phosphorothioate, phosphorodithioate, O-methylphophoroamidite linkages and peptide polynucleotide backbones and linkages. Other analogue polynucleotides include those with positive backbones, non-ionic backbones and non-ribose backbones. Polynucleotides containing one or more carbocyclic sugars are also included.

[0101] Other analogues include peptide polynucleotides which are peptide polynucleotide analogues. These backbones are substantially non-ionic under neutral conditions, in contrast to the highly charged phosphodiester backbone of naturally occurring polynucleotides. This may result in advantages. First, the peptide polynucleotide backbone may exhibit improved hybridization kinetics. Peptide polynucleotides have larger changes in the melting temperature for mismatched versus perfectly matched base pairs. DNA and RNA typically exhibit a 2-4° C. drop in melting temperature for an internal mismatch. With the non-ionic peptide polynucleotide backbone, the drop is closer to 7-9° C. Similarly, due to their non-ionic nature, hybridization of the bases attached to these backbones is relatively insensitive to salt concentration. In addition, peptide polynucleotides may not be degraded or degraded to a lesser extent by cellular enzymes, and thus may be more stable.

[0102] Among the uses of the disclosed polynucleotides, and fragments thereof, is the use of fragments as probes in nucleic acid hybridisation assays or primers for use in nucleic acid amplification assays. Such fragments generally comprise at least about 10, 11, 12, 13, 14, 15, 16, 17, 18, 19 or 20 or more contiguous nucleotides of a DNA sequence. In other embodiments, a DNA fragment comprises at least about 10, 15, 20, 30, 40, 50 or 60 or more contiguous nucleotides of a DNA sequence. Thus, in one aspect, there is also provided a method for detecting a polynucleotide encoding a protein with nicotine N-demethylase activity member or encoding a nicotine N-demethylase enzyme comprising the use of the probes or primers or both.

[0103] The basic parameters affecting the choice of hybridization conditions and guidance for devising suitable conditions are described by Sambrook, J., E. F. Fritsch, and T. Maniatis (1989, Molecular Cloning: A Laboratory Manual, Cold Spring Harbor Laboratory Press, Cold Spring Harbor, N.Y.). Using knowledge of the genetic code in combination with the amino acid sequences described herein, sets of degenerate oligonucleotides can be prepared. Such oligonucleotides are useful as primers, for example, in polymerase chain reactions (PCR), whereby DNA fragments are isolated and amplified. In certain embodiments, degenerate primers can be used as probes for genetic libraries. Such libraries would include but are not limited to cDNA libraries, genomic libraries, and even electronic express sequence tag or DNA libraries. Homologous sequences identified by this method would then be used as probes to identify homologues of the sequences identified herein.

[0104] Also of potential use are polynucleotides and oligonucleotides (for example, primers or probes) that hybridize under reduced stringency conditions, typically moderately stringent conditions, and commonly highly stringent conditions to the polynucleotide(s) as described herein. The basic parameters affecting the choice of hybridization conditions and guidance for devising suitable conditions are set forth by Sambrook, J., E. F. Fritsch, and T. Maniatis (1989, Molecular Cloning: A Laboratory Manual, Cold Spring Harbor Laboratory Press, Cold Spring Harbor, N.Y. and can be readily determined by those having ordinary skill in the art based on, for example, the length or base composition of the polynucleotide. One way of achieving moderately stringent conditions involves the use of a prewashing solution containing 5× Standard Sodium Citrate, 0.5% Sodium Dodecyl Sulphate, 1.0 mM Ethylenediaminetetraacetic acid (pH 8.0), hybridization buffer of about 50% formamide, 6× Standard Sodium Citrate, and a hybridization temperature of about 55° C. (or other similar hybridization solutions, such as one containing about 50% formamide, with a hybridization temperature of about 42° C.), and washing conditions of about 60° C., in 0.5× Standard Sodium Citrate, 0.1% Sodium Dodecyl Sulphate. Generally, highly stringent conditions are defined as hybridization conditions as above, but with washing at approximately 68° C., 0.2× Standard Sodium Citrate, 0.1% Sodium Dodecyl Sulphate. SSPE (1×SSPE is 0.15 M sodium chloride, 10 mM sodium phosphate, and 1.25 mM Ethylenediaminetetraacetic acid, pH 7.4) can be substituted for Standard Sodium Citrate (1× Standard Sodium Citrate is 0.15 M sodium chloride and 15 mM sodium citrate) in the hybridization and wash buffers; washes are performed for 15 minutes after hybridization is complete. It should be understood that the wash temperature and wash salt concentration can be adjusted as necessary to achieve a desired degree of stringency by applying the basic principles that govern hybridization reactions and duplex stability, as known to those skilled in the art and described further below (see, for example, Sambrook, J., E. F. Fritsch, and T. Maniatis (1989, Molecular Cloning: A Laboratory Manual, Cold Spring Harbor Laboratory Press, Cold Spring Harbor, N.Y.). When hybridizing a polynucleotide to a target polynucleotide of unknown sequence, the hybrid length is assumed to be that of the hybridizing polynucleotide. When polynucleotides of known sequence are hybridized, the hybrid length can be determined by aligning the sequences of the polynucleotides and identifying the region or regions of optimal sequence complementarity. The hybridization temperature for hybrids anticipated to be less than 50 base pairs in length should be 5 to 10° C. less than the melting temperature of the hybrid, where melting temperature is determined according to the following equations. For hybrids less than 18 base pairs in length, melting temperature (° C.)=2(number of A+T bases)+4(number of G+C bases). For hybrids above 18 base pairs in length, melting temperature (° C.)=81.5+16.6(log 10 [Na+])+0.41(% G+C)−(600/N), where N is the number of bases in the hybrid, and [Na+] is the concentration of sodium ions in the hybridization buffer ([Na+] for 1× Standard Sodium Citrate=0.165M). Typically, each such hybridizing polynucleotide has a length that is at least 25% (commonly at least 50%, 60%, or 70%, and most commonly at least 80%) of the length of a polynucleotide to which it hybridizes, and has at least 60% sequence identity (for example, at least 70%, 75%, 80%, 85%, 90%, 95%, 96%, 97%, 98%, 99% or 100%) with a polynucleotide to which it hybridizes.

[0105] As will be understood by the person skilled in the art, a linear DNA has two possible orientations: the 5′-to-3′ direction and the 3′-to-5′ direction. For example, if a reference sequence is positioned in the 5′-to-3′ direction, and if a second sequence is positioned in the 5′-to-3′ direction within the same polynucleotide molecule/strand, then the reference sequence and the second sequence are orientated in the same direction, or have the same orientation. Typically, a promoter sequence and a gene of interest under the regulation of the given promoter are positioned in the same orientation. However, with respect to the reference sequence positioned in the 5′-to-3′ direction, if a second sequence is positioned in the 3′-to-5′ direction within the same polynucleotide molecule/strand, then the reference sequence and the second sequence are orientated in anti-sense direction, or have anti-sense orientation. Two sequences having anti-sense orientations with respect to each other can be alternatively described as having the same orientation, if the reference sequence (5′-to-3′ direction) and the reverse complementary sequence of the reference sequence (reference sequence positioned in the 5′-to-3′) are positioned within the same polynucleotide molecule/strand. The sequences set forth herein are shown in the 5′-to-3′ direction.

[0106] Recombinant constructs provided herein can be used to transform plants or plant cells in order to modulate protein expression and/or activity levels. A recombinant polynucleotide construct can comprise a polynucleotide encoding one or more polynucleotides as described herein, operably linked to a regulatory region suitable for expressing the polypeptide. Thus, a polynucleotide can comprise a coding sequence that encodes the polypeptide as described herein. Plants or plant cells in which protein expression and/or activity levels are modulated can include mutant, non-naturally occurring, transgenic, man-made or genetically engineered plants or plant cells. Suitably, the transgenic plant or plant cell comprises a genome that has been altered by the stable integration of recombinant DNA. Recombinant DNA includes DNA which has been genetically engineered and constructed outside of a cell and includes DNA containing naturally occurring DNA or cDNA or synthetic DNA. A transgenic plant can include a plant regenerated from an originally-transformed plant cell and progeny transgenic plants from later generations or crosses of a transformed plant.

[0107] Suitably, the transgenic modification alters the expression or activity of the polynucleotide or the polypeptide described herein as compared to a control plant.

[0108] The polypeptide encoded by a recombinant polynucleotide can be a native polypeptide, or can be heterologous to the cell. In some cases, the recombinant construct contains a polynucleotide that modulates expression, operably linked to a regulatory region. Examples of suitable regulatory regions are described herein.

[0109] Vectors containing recombinant polynucleotide constructs such as those described herein are also provided. Suitable vector backbones include, for example, those routinely used in the art such as plasmids, viruses, artificial chromosomes, bacterial artificial chromosomes, yeast artificial chromosomes, or bacteriophage artificial chromosomes. Suitable expression vectors include, without limitation, plasmids and viral vectors derived from, for example, bacteriophage, baculoviruses, and retroviruses. Numerous vectors and expression systems are commercially available. The vectors can include, for example, origins of replication, scaffold attachment regions or markers. A marker gene can confer a selectable phenotype on a plant cell. For example, a marker can confer biocide resistance, such as resistance to an antibiotic (for example, kanamycin, G418, bleomycin, or hygromycin), or an herbicide (for example, glyphosate, chlorsulfuron or phosphinothricin). In addition, an expression vector can include a tag sequence designed to facilitate manipulation or detection (for example, purification or localization) of the expressed polypeptide. Tag sequences, such as luciferase, beta-glucuronidase, green fluorescent protein, glutathione S-transferase, polyhistidine, c-myc or hemagglutinin sequences typically are expressed as a fusion with the encoded polypeptide. Such tags can be inserted anywhere within the polypeptide, including at either the carboxyl or amino terminus.

[0110] A plant or plant cell can be transformed by having the recombinant polynucleotide integrated into its genome to become stably transformed. The plant or plant cell described herein can be stably transformed. Stably transformed cells typically retain the introduced polynucleotide with each cell division. A plant or plant cell can be transiently transformed such that the recombinant polynucleotide is not integrated into its genome. Transiently transformed cells typically lose all or some portion of the introduced recombinant polynucleotide with each cell division such that the introduced recombinant polynucleotide cannot be detected in daughter cells after a sufficient number of cell divisions.

[0111] A number of methods are available in the art for transforming a plant cell which are all encompassed herein, including biolistics, gene gun techniques, Agrobacterium-mediated transformation, viral vector-mediated transformation and electroporation. The Agrobacterium system for integration of foreign DNA into plant chromosomes has been extensively studied, modified, and exploited for plant genetic engineering. Naked recombinant DNA molecules comprising DNA sequences corresponding to the subject purified tobacco protein operably linked, in the sense or antisense orientation, to regulatory sequences are joined to appropriate T-DNA sequences by conventional methods. These are introduced into tobacco protoplasts by polyethylene glycol techniques or by electroporation techniques, both of which are standard. Alternatively, such vectors comprising recombinant DNA molecules encoding the subject purified tobacco protein are introduced into live Agrobacterium cells, which then transfer the DNA into the tobacco plant cells. Transformation by naked DNA without accompanying T-DNA vector sequences can be accomplished via fusion of tobacco protoplasts with DNA-containing liposomes or via electroporation. Naked DNA unaccompanied by T-DNA vector sequences can also be used to transform tobacco cells via inert, high velocity microprojectiles.

[0112] If a cell or cultured tissue is used as the recipient tissue for transformation, plants can be regenerated from transformed cultures if desired, by techniques known to those skilled in the art.

[0113] The choice of regulatory regions to be included in a recombinant construct depends upon several factors, including, but not limited to, efficiency, selectability, inducibility, desired expression level, and cell- or tissue-preferential expression. It is a routine matter for one of skill in the art to modulate the expression of a coding sequence by appropriately selecting and positioning regulatory regions relative to the coding sequence. Transcription of a polynucleotide can be modulated in a similar manner. Some suitable regulatory regions initiate transcription only, or predominantly, in certain cell types. Methods for identifying and characterizing regulatory regions in plant genomic DNA are known in the art.

[0114] Suitable promoters include tissue-specific promoters recognized by tissue-specific factors present in different tissues or cell types (for example, root-specific promoters, shoot-specific promoters, xylem-specific promoters), or present during different developmental stages, or present in response to different environmental conditions. Suitable promoters include constitutive promoters that can be activated in most cell types without requiring specific inducers. Examples of suitable promoters for controlling RNAi polypeptide production include the cauliflower mosaic virus 35S (CaMV/35S), SSU, OCS, lib4, usp, STLS1, B33, nos or ubiquitin- or phaseolin-promoters. Persons skilled in the art are capable of generating multiple variations of recombinant promoters.

[0115] Tissue-specific promoters are transcriptional control elements that are only active in particular cells or tissues at specific times during plant development, such as in vegetative tissues or reproductive tissues. Tissue-specific expression can be advantageous, for example, when the expression of polynucleotides in certain tissues is preferred. Examples of tissue-specific promoters under developmental control include promoters that can initiate transcription only (or primarily only) in certain tissues, such as vegetative tissues, for example, roots or leaves, or reproductive tissues, such as fruit, ovules, seeds, pollen, pistols, flowers, or any embryonic tissue. Reproductive tissue-specific promoters may be, for example, anther-specific, ovule-specific, embryo-specific, endosperm-specific, integument-specific, seed and seed coat-specific, pollen-specific, petal-specific, sepal-specific, or combinations thereof.

[0116] Suitable leaf-specific promoters include pyruvate, orthophosphate dikinase (PPDK) promoter from C4 plant (maize), cab-m1Ca+2 promoter from maize, the Arabidopsis thaliana myb-related gene promoter (Atmyb5), the ribulose biphosphate carboxylase (RBCS) promoters (for example, the tomato RBCS 1, RBCS2 and RBCS3A genes expressed in leaves and light-grown seedlings, RBCS1 and RBCS2 expressed in developing tomato fruits or ribulose bisphosphate carboxylase promoter expressed almost exclusively in mesophyll cells in leaf blades and leaf sheaths at high levels).

[0117] Suitable senescence-specific promoters include a tomato promoter active during fruit ripening, senescence and abscission of leaves, a maize promoter of gene encoding a cysteine protease, the promoter of 82E4 and the promoter of SAG genes. Suitable anther-specific promoters can be used. Suitable root-preferred promoters known to persons skilled in the art may be selected. Suitable seed-preferred promoters include both seed-specific promoters (those promoters active during seed development such as promoters of seed storage proteins) and seed-germinating promoters (those promoters active during seed germination). Such seed-preferred promoters include, but are not limited to, Cim1 (cytokinin-induced message); cZ19B1 (maize 19 kDa zein); milps (myo-inositol-1-phosphate synthase); mZE40-2, also known as Zm-40; nucic; and celA (cellulose synthase). Gama-zein is an endosperm-specific promoter. Glob-1 is an embryo-specific promoter. For dicots, seed-specific promoters include, but are not limited to, bean beta-phaseolin, napin, β-conglycinin, soybean lectin, cruciferin, and the like. For monocots, seed-specific promoters include, but are not limited to, a maize 15 kDa zein promoter, a 22 kDa zein promoter, a 27 kDa zein promoter, a g-zein promoter, a 27 kDa gamma-zein promoter (such as gzw64A promoter, see Genbank Accession number S78780), a waxy promoter, a shrunken 1 promoter, a shrunken 2 promoter, a globulin 1 promoter (see Genbank Accession number L22344), an Itp2 promoter, cim1 promoter, maize end1 and end2 promoters, nuc1 promoter, Zm40 promoter, eep1 and eep2; led, thioredoxin H promoter; mlip15 promoter, PCNA2 promoter; and the shrunken-2 promoter.

[0118] Examples of inducible promoters include promoters responsive to pathogen attack, anaerobic conditions, elevated temperature, light, drought, cold temperature, or high salt concentration. Pathogen-inducible promoters include those from pathogenesis-related proteins (PR proteins), which are induced following infection by a pathogen (for example, PR proteins, SAR proteins, beta-1,3-glucanase, chitinase).

[0119] In addition to plant promoters, other suitable promoters may be derived from bacterial origin for example, the octopine synthase promoter, the nopaline synthase promoter and other promoters derived from Ti plasmids, or may be derived from viral promoters (for example, 35S and 19S RNA promoters of cauliflower mosaic virus (CaMV), constitutive promoters of tobacco mosaic virus, cauliflower mosaic virus (CaMV) 19S and 35S promoters, or figwort mosaic virus 35S promoter).

[0120] Preferred promoters include the control elements provided herein, as part of SEQ ID Nos. 1-80, which demonstrate desirable expression during curing procedures in tobacco leaf.

[0121] In another aspect, there is provided an isolated polypeptide comprising, consisting or consisting essentially of a polypeptide sequence having at least 95% sequence identity to any of the polypeptide sequences described herein, including any of the polypeptides shown in the sequence listing. Suitably, the isolated polypeptide comprises, consists or consists essentially of a sequence having at least 95% 96%, 97%, 98%, 99%, 99.1%, 99.2%, 99.3%, 99.4%, 99.5%, 99.6%, 99.7%, 99.8%, 99.9% or 100% sequence identity thereto.

[0122] The polypeptide can include sequences comprising a sufficient or substantial degree of identity or similarity to SEQ ID NOs: 81-160 to function as proteases. Fragments of the polypeptide(s) typically retain some or all of the activity of the full length sequence.

[0123] As discussed herein, the polypeptides also include mutants produced by introducing any type of alterations (for example, insertions, deletions, or substitutions of amino acids; changes in glycosylation states; changes that affect refolding or isomerizations, three-dimensional structures, or self-association states), which can be deliberately engineered or isolated naturally provided that they still have some or all of their function or activity as a protease. Suitably, the function or activity as a protease is modulated, increased or reduced. Polypeptides include variants produced by introducing any type of alterations (for example, insertions, deletions, or substitutions of amino acids; changes in glycosylation states; changes that affect refolding or isomerizations, three-dimensional structures, or self-association states), which can be deliberately engineered or isolated naturally. The variant may have alterations which produce a silent change and result in a functionally equivalent protein. Deliberate amino acid substitutions may be made on the basis of similarity in polarity, charge, solubility, hydrophobicity, hydrophilicity and the amphipathic nature of the residues as long as the secondary binding activity of the substance is retained. For example, negatively charged amino acids include aspartic acid and glutamic acid; positively charged amino acids include lysine and arginine; and amino acids with uncharged polar head groups having similar hydrophilicity values include leucine, isoleucine, valine, glycine, alanine, asparagine, glutamine, serine, threonine, phenylalanine, and tyrosine. Conservative substitutions may be made, for example according to the Table below. Amino acids in the same block in the second column and preferably in the same line in the third column may be substituted for each other:

| | | |
|---|---|---|
| ALIPHATIC | Non-polar | Gly Ala Pro |
| | | Ile Leu Val |
| | Polar - uncharged | Cys Ser Thr Met |
| | | Asn Gly |
| | Polar - charged | Asp Glu |
| | | Lys Arg |
| AROMATIC | | His Phe TrpTyr |

[0124] The polypeptide may be a mature protein or an immature protein or a protein derived from an immature protein. Polypeptides may be in linear form or cyclized using known methods. Polypeptides typically comprise at least 10, at least 20, at least 30, or at least 40 contiguous amino acids.

[0125] A tobacco plant or plant cell comprising a mutation in a gene encoding a protease as described herein is disclosed, wherein said mutation results in modulated expression or modulated function of said protease. The expression or function of the protease(s) may be enhanced. Aside from one or more mutations in said protease, the mutant plants or plant cells can have one or more further mutations in one or more other genes or polypeptides. In certain embodiments, aside from the one or more mutations in a protease gene, the mutants can have one or more further mutations in one or more other genes or polypeptides—such as one or more other protease genes or polypeptides as described in the Sequence Listing. Suitably, a protease is expressed in the leaves of the mutant plant during the curing procedure.

[0126] There is also provided a method for modulating the level of a protease in a (cured) tobacco plant or in (cured) tobacco plant material said method comprising introducing into the genome of said plant one or more mutations that modulate expression of at least one protease gene, wherein said at least one protease gene is selected from SEQ ID Nos: 1-80. There is also provided a method for identifying a tobacco plant with increased levels of protease, said method comprising screening a nucleic acid sample from a tobacco plant of interest for the presence of one or more mutations in SEQ ID NOs:1-80, and optionally correlating the identified mutation(s) with mutation(s) that are known to modulate levels of protease.

[0127] There is also disclosed a tobacco plant or plant cell that is heterozygous or homozygous for mutations in a gene encoding a protease, wherein said mutation results in modulated (enhanced or reduced) expression or function of said protease.

[0128] A number of approaches can be used to combine mutations in one plant including sexual crossing. A plant having one or more favourable heterozygous or homozygous mutations in a protease gene that enhances or reduces protease expression or activity can be crossed with a plant having one or more favourable heterozygous or homozygous mutations in one or more other protease genes that enhance or reduce protease activity. In one embodiment, crosses are made in order to introduce one or more favourable heterozygous or homozygous mutations within a protease gene within the same plant.

[0129] The activity of one or more protease polypeptides in a tobacco plant is reduced or enhanced according to the present disclosure if the protease activity is statistically lower or higher than the protease activity of the same protease(s) in a tobacco plant that has not been modified to inhibit the activity of that protease polypeptide and which has been cultured, harvested and cured using the same protocols.

[0130] In some embodiments, the mutation(s) is introduced into a tobacco plant or plant cell using a mutagenesis approach, and the introduced mutation is identified or selected using methods known to those of skill in the art—such as Southern blot analysis, DNA sequencing, PCR analysis, or phenotypic analysis. Mutations that impact gene expression or that interfere with the function of the encoded protein can be determined using methods that are well known in the art. Insertional mutations in gene exons usually result in null-mutants. Mutations in conserved residues can be particularly effective in inhibiting the metabolic function of the encoded protein.

[0131] Methods for obtaining mutant polynucleotides and polypeptides are also disclosed. Any plant of interest, including a plant cell or plant material can be genetically modified by various methods known to induce mutagenesis, including site-directed mutagenesis, oligonucleotide-directed mutagenesis, chemically-induced mutagenesis, irradiation-induced mutagenesis, mutagenesis utilizing modified bases, mutagenesis utilizing gapped duplex DNA, double-strand break mutagenesis, mutagenesis utilizing repair-deficient host strains, mutagenesis by total gene synthesis, DNA shuffling and other equivalent methods.

[0132] Fragments of protease polynucleotides and polypeptides encoded thereby are also disclosed. Fragments of a polynucleotide may encode protein fragments that retain the biological activity of the native protein and hence are involved in the metabolic conversion of nicotine to nornicotine. Alternatively, fragments of a polynucleotide that are useful as hybridization probes or PCR primers generally do not encode fragment proteins retaining biological activity. Furthermore, fragments of the disclosed nucleotide sequences include those that can be assembled within recombinant constructs as discussed herein. Fragments of a polynucleotide sequence may range from at least about 25 nucleotides, about 50 nucleotides, about 75 nucleotides, about 100 nucleotides about 150 nucleotides, about 200 nucleotides, about 250 nucleotides, about 300 nucleotides, about 400 nucleotides, about 500 nucleotides, about 600 nucleotides, about 700 nucleotides, about 800 nucleotides, about 900 nucleotides, about 1000 nucleotides, about 1100 nucleotides, about 1200 nucleotides, about 1300 nucleotides or about 1400 nucleotides and up to the full-length polynucleotide encoding the polypeptides described herein. Fragments of a polypeptide sequence may range from at least about 25 amino acids, about 50 amino acids, about 75 amino acids, about 100 amino acids about 150 amino acids, about 200 amino acids, about 250 amino acids, about 300 amino acids, about 400 amino acids, about 500 amino acids, and up to the full-length polypeptide described herein.

[0133] Mutant polypeptide variants can be used to create mutant, non-naturally occurring or transgenic plants (for example, mutant, non-naturally occurring, transgenic, man-made or genetically engineered plants) or plant cells comprising one or more mutant polypeptide variants. Suitably, mutant polypeptide variants retain the activity of the unmutated polypeptide. The activity of the mutant polypeptide variant may be higher, lower or about the same as the unmutated polypeptide.

[0134] Mutations in the nucleotide sequences and polypeptides described herein can include man-made mutations or synthetic mutations or genetically engineered mutations. Mutations in the nucleotide sequences and polypeptides described herein can be mutations that are obtained or obtainable via a process which includes an in vitro or an in vivo manipulation step. Mutations in the nucleotide sequences and polypeptides described herein can be mutations that are obtained or obtainable via a process which includes intervention by man. By way of example, the process may include mutagenesis using exogenously added chemicals—such as mutagenic, teratogenic, or carcinogenic organic compounds, for example ethyl methanesulfonate (EMS), that produce random mutations in genetic material. By way of further example, the process may include one or more genetic engineering steps—such as one or more of the genetic engineering steps that are described herein or combinations thereof. By way of further example, the process may include one or more plant crossing steps.

[0135] A polypeptide may be prepared by culturing transformed or recombinant host cells under culture conditions suitable to express a polypeptide. The resulting expressed polypeptide may then be purified from such culture using known purification processes. The purification of the polypeptide may include an affinity column containing agents which will bind to the polypeptide; one or more column steps over such affinity resins; one or more steps involving hydrophobic interaction chromatography; or immunoaffinity chromatography. Alternatively, the polypeptide may also be expressed in a form that will facilitate purification. For example, it may be expressed as a fusion polypeptide, such as those of maltose binding polypeptide, glutathione-5-transferase, his-tag or thioredoxin. Kits for expression and purification of fusion polypeptides are commercially available. The polypeptide may be tagged with an epitope and subsequently purified by using a specific antibody directed to such epitope. One or more liquid chromatography steps—such as reverse-phase high performance liquid chromatography can be employed to further purify the polypeptide. Some or all of the foregoing purification steps, in various combinations, can be employed to provide a substantially homogeneous recombinant polypeptide. The polypeptide thus purified may be substantially free of other polypeptides and is defined herein as a “substantially purified polypeptide”; such purified polypeptides include polypeptides, fragments, variants, and the like. Expression, isolation, and purification of the polypeptides and fragments can be accomplished by any suitable technique, including but not limited to the methods described herein.

[0136] It is also possible to utilise an affinity column such as a monoclonal antibody generated against polypeptides, to affinity-purify expressed polypeptides. These polypeptides can be removed from an affinity column using conventional techniques, for example, in a high salt elution buffer and then dialyzed into a lower salt buffer for use or by changing pH or other components depending on the affinity matrix utilized, or be competitively removed using the naturally occurring substrate of the affinity moiety.

[0137] Isolated or substantially purified polynucleotides or protein compositions are disclosed. An “isolated” or “purified” polynucleotide or protein, or biologically active portion thereof, is substantially or essentially free from components that normally accompany or interact with the polynucleotide or protein as found in its naturally occurring environment. Thus, an isolated or purified polynucleotide or protein is substantially free of other cellular material, or culture medium when produced by recombinant techniques, or substantially free of chemical precursors or other chemicals when chemically synthesized. Optimally, an “isolated” polynucleotide is free of sequences (optimally protein encoding sequences) that naturally flank the polynucleotide (for example, sequences located at the 5′ and 3′ ends of the polynucleotide) in the genomic DNA of the organism from which the polynucleotide is derived. For example, in various embodiments, the isolated polynucleotide can contain less than about 5 kb, 4 kb, 3 kb, 2 kb, 1 kb, 0.5 kb, or 0.1 kb of nucleotide sequence that naturally flank the polynucleotide in genomic DNA of the cell from which the polynucleotide is derived. A protein that is substantially free of cellular material includes preparations of protein having less than about 30%, 20%, 10%, 5%, or 1% (by dry weight) of contaminating protein.

[0138] A polypeptide may also be produced by known conventional chemical synthesis. Methods for constructing the polypeptides or fragments thereof by synthetic means are known to those skilled in the art. The synthetically-constructed polypeptide sequences, by virtue of sharing primary, secondary or tertiary structural or conformational characteristics with native polypeptides may possess biological properties in common therewith, including biological activity.

[0139] The term ‘non-naturally occurring’ as used herein describes an entity (for example, a polynucleotide, a genetic mutation, a polypeptide, a plant, a plant cell and plant material) that is not formed by nature or that does not exist in nature. Such non-naturally occurring entities or artificial entities may be made, synthesized, initiated, modified, intervened, or manipulated by methods described herein or that are known in the art. Such non-naturally occurring entities or artificial entities may be made, synthesized, initiated, modified, intervened, or manipulated by man. Thus, by way of example, a non-naturally occurring plant, a non-naturally occurring plant cell or non-naturally occurring plant material may be made using traditional plant breeding techniques—such as backcrossing—or by genetic manipulation technologies—such as antisense RNA, interfering RNA, meganuclease and the like. By way of further example, a non-naturally occurring plant, a non-naturally occurring plant cell or non-naturally occurring plant material may be made by introgression of or by transferring one or more genetic mutations (for example one or more polymorphisms) from a first plant or plant cell into a second plant or plant cell (which may itself be naturally occurring), such that the resulting plant, plant cell or plant material or the progeny thereof comprises a genetic constitution (for example, a genome, a chromosome or a segment thereof) that is not formed by nature or that does not exist in nature. The resulting plant, plant cell or plant material is thus artificial or non-naturally occurring. Accordingly, an artificial or non-naturally occurring plant or plant cell may be made by modifying a genetic sequence in a first naturally occurring plant or plant cell, even if the resulting genetic sequence occurs naturally in a second plant or plant cell that comprises a different genetic background from the first plant or plant cell. In certain embodiments, a mutation is not a naturally occurring mutation that exists naturally in a nucleotide sequence or a polypeptide—such as a gene or a protein.

[0140] Differences in genetic background can be detected by phenotypic differences or by molecular biology techniques known in the art—such as nucleic acid sequencing, presence or absence of genetic markers (for example, microsatellite RNA markers).

[0141] Antibodies that are immunoreactive with the polypeptides described herein are also provided. The polypeptides, fragments, variants, fusion polypeptides, and the like, as set forth herein, can be employed as “immunogens” in producing antibodies immunoreactive therewith. Such antibodies may specifically bind to the polypeptide via the antigen-binding sites of the antibody. Specifically binding antibodies are those that will specifically recognize and bind with a polypeptide, homologues, and variants, but not with other molecules. In one embodiment, the antibodies are specific for polypeptides having an amino acid sequence as set forth herein and do not cross-react with other polypeptides.

[0142] More specifically, the polypeptides, fragment, variants, fusion polypeptides, and the like contain antigenic determinants or epitopes that elicit the formation of antibodies. These antigenic determinants or epitopes can be either linear or conformational (discontinuous). Linear epitopes are composed of a single section of amino acids of the polypeptide, while conformational or discontinuous epitopes are composed of amino acids sections from different regions of the polypeptide chain that are brought into close proximity upon polypeptide folding. Epitopes can be identified by any of the methods known in the art. Additionally, epitopes from the polypeptides can be used as research reagents, in assays, and to purify specific binding antibodies from substances such as polyclonal sera or supernatants from cultured hybridomas. Such epitopes or variants thereof can be produced using techniques known in the art such as solid-phase synthesis, chemical or enzymatic cleavage of a polypeptide, or using recombinant DNA technology.

[0143] Both polyclonal and monoclonal antibodies to the polypeptides can be prepared by conventional techniques. Hybridoma cell lines that produce monoclonal antibodies specific for the polypeptides are also contemplated herein. Such hybridomas can be produced and identified by conventional techniques. For the production of antibodies, various host animals may be immunized by injection with a polypeptide, fragment, variant, or mutants thereof. Such host animals may include, but are not limited to, rabbits, mice, and rats, to name a few. Various adjutants may be used to increase the immunological response. Depending on the host species, such adjuvants include, but are not limited to, Freund's (complete and incomplete), mineral gels such as aluminium hydroxide, surface active substances such as lysolecithin, pluronic polyols, polyanions, peptides, oil emulsions, keyhole limpet hemocyanin, dinitrophenol, and potentially useful human adjuvants such as BCG (bacille Calmette-Guerin) and Corynebacterium parvum. The monoclonal antibodies can be recovered by conventional techniques. Such monoclonal antibodies may be of any immunoglobulin class including IgG, IgM, IgE, IgA, IgD, and any subclass thereof.

[0144] The antibodies can also be used in assays to detect the presence of the polypeptides or fragments, either in vitro or in vivo. The antibodies also can be employed in purifying polypeptides or fragments by immunoaffinity chromatography.

[0145] Other than mutagenesis, compositions that can modulate the expression or the activity of one or more of the proteases described herein include, but are not limited to, sequence-specific polynucleotides that can interfere with the transcription of one or more endogenous gene(s); sequence-specific polynucleotides that can interfere with the translation of RNA transcripts (for example, double-stranded RNAs, siRNAs, ribozymes); sequence-specific polypeptides that can interfere with the stability of one or more proteins; sequence-specific polynucleotides that can interfere with the enzymatic activity of one or more proteins or the binding activity of one or more proteins with respect to substrates or regulatory proteins; antibodies that exhibit specificity for one or more proteins; small molecule compounds that can interfere with the stability of one or more proteins or the enzymatic activity of one or more proteins or the binding activity of one or more proteins; zinc finger proteins that bind one or more polynucleotides; and meganucleases that have activity towards one or more polynucleotides. Gene editing technologies, genetic editing technologies and genome editing technologies are well known in the art.

[0146] One method of gene editing involves the use of transcription activator-like effector nucleases (TALENs) which induce double-strand breaks which cells can respond to with repair mechanisms. Non-homologous end joining reconnects DNA from either side of a double-strand break where there is very little or no sequence overlap for annealing. This repair mechanism induces errors in the genome via insertion or deletion, or chromosomal rearrangement. Any such errors may render the gene products coded at that location non-functional. Another method of gene editing involves the use of the bacterial CRISPR/Cas system. Bacteria and archaea exhibit chromosomal elements called clustered regularly interspaced short palindromic repeats (CRISPR) that are part of an adaptive immune system that protects against invading viral and plasmid DNA. In Type II CRISPR systems, CRISPR RNAs (crRNAs) function with trans-activating crRNA (tracrRNA) and CRISPR-associated (Cas) proteins to introduce double-stranded breaks in target DNA. Target cleavage by Cas9 requires base-pairing between the crRNA and tracrRNA as well as base pairing between the crRNA and the target DNA. Target recognition is facilitated by the presence of a short motif called a protospacer-adjacent motif (PAM) that conforms to the sequence NGG. This system can be harnessed for genome editing. Cas9 is normally programmed by a dual RNA consisting of the crRNA and tracrRNA. However, the core components of these RNAs can be combined into a single hybrid ‘guide RNA’ for Cas9 targeting. The use of a noncoding RNA guide to target DNA for site-specific cleavage promises to be significantly more straightforward than existing technologies—such as TALENs. Using the CRISPR/Cas strategy, retargeting the nuclease complex only requires introduction of a new RNA sequence and there is no need to reengineer the specificity of protein transcription factors. Antisense technology is another well-known method that can be used to modulate the expression of a polypeptide. A polynucleotide of the gene to be repressed is cloned and operably linked to a regulatory region and a transcription termination sequence so that the antisense strand of RNA is transcribed. The recombinant construct is then transformed into a plant cell and the antisense strand of RNA is produced. The polynucleotide need not be the entire sequence of the gene to be repressed, but typically will be substantially complementary to at least a portion of the sense strand of the gene to be repressed.

[0147] A polynucleotide may be transcribed into a ribozyme, or catalytic RNA, that affects expression of an mRNA. Ribozymes can be designed to specifically pair with virtually any target RNA and cleave the phosphodiester backbone at a specific location, thereby functionally inactivating the target RNA. Heterologous polynucleotides can encode ribozymes designed to cleave particular mRNA transcripts, thus preventing expression of a polypeptide. Hammerhead ribozymes are useful for destroying particular mRNAs, although various ribozymes that cleave mRNA at site-specific recognition sequences can be used. Hammerhead ribozymes cleave mRNAs at locations dictated by flanking regions that form complementary base pairs with the target mRNA. The sole requirement is that the target RNA contains a 5′-UG-3′ nucleotide sequence. The construction and production of hammerhead ribozymes is known in the art. Hammerhead ribozyme sequences can be embedded in a stable RNA such as a transfer RNA (tRNA) to increase cleavage efficiency in vivo.

[0148] In one embodiment, the sequence-specific polynucleotide that can interfere with the translation of RNA transcript(s) is interfering RNA. RNA interference or RNA silencing is an evolutionarily conserved process by which specific mRNAs can be targeted for enzymatic degradation. A double-stranded RNA (double-stranded RNA) is introduced or produced by a cell (for example, double-stranded RNA virus, or interfering RNA polynucleotides) to initiate the interfering RNA pathway. The double-stranded RNA can be converted into multiple small interfering RNA duplexes of 21-24 bp length by RNases III, which are double-stranded RNA-specific endonucleases. The small interfering RNAs can be subsequently recognized by RNA-induced silencing complexes that promote the unwinding of small interfering RNA through an ATP-dependent process. The unwound antisense strand of the small interfering RNA guides the activated RNA-induced silencing complexes to the targeted mRNA comprising a sequence complementary to the small interfering RNA anti-sense strand. The targeted mRNA and the anti-sense strand can form an A-form helix, and the major groove of the A-form helix can be recognized by the activated RNA-induced silencing complexes. The target mRNA can be cleaved by activated RNA-induced silencing complexes at a single site defined by the binding site of the 5′-end of the small interfering RNA strand. The activated RNA-induced silencing complexes can be recycled to catalyze another cleavage event. Interfering RNA expression vectors may comprise interfering RNA constructs encoding interfering RNA polynucleotides that exhibit RNA interference activity by reducing the expression level of mRNAs, pre-mRNAs, or related RNA variants. The expression vectors may comprise a promoter positioned upstream and operably-linked to an Interfering RNA construct, as further described herein. Interfering RNA expression vectors may comprise a suitable minimal core promoter, a Interfering RNA construct of interest, an upstream (5′) regulatory region, a downstream (3′) regulatory region, including transcription termination and polyadenylation signals, and other sequences known to persons skilled in the art, such as various selection markers.

[0149] Various embodiments are directed to methods for modulating the expression level of one or more of the polynucleotide(s) described herein (or any combination thereof as described herein) by integrating multiple copies of the polynucleotide(s) into a (tobacco) plant genome, comprising: transforming a plant cell host with an expression vector that comprises a promoter operably-linked to a polynucleotide.

[0150] Various compositions and methods are provided for modulating the endogenous gene expression level by modulating the translation of mRNA. A host (tobacco) plant cell can be transformed with an expression vector comprising: a promoter operably-linked to a polynucleotide, positioned in anti-sense orientation with respect to the promoter to enable the expression of RNA polynucleotides having a sequence complementary to a portion of mRNA.

[0151] Various expression vectors for modulating the translation of mRNA may comprise: a promoter operably-linked to a polynucleotide in which the sequence is positioned in anti-sense orientation with respect to the promoter. The lengths of anti-sense RNA polynucleotides can vary, and may be from about 15-20 nucleotides, about 20-30 nucleotides, about 30-50 nucleotides, about 50-75 nucleotides, about 75-100 nucleotides, about 100-150 nucleotides, about 150-200 nucleotides, and about 200-300 nucleotides.

[0152] As discussed herein, the expression of one or more polypeptides can be modulated by non-transgenic means—such as creating one or more mutations in one or more genes, as discussed herein. Methods that introduce a mutation randomly in a gene sequence can include chemical mutagenesis, EMS mutagenesis and radiation mutagenesis. Methods that introduce one or more targeted mutations into a cell include but are not limited to genome editing technology, particularly zinc finger nuclease-mediated mutagenesis and targeting induced local lesions in genomes (TILLING), homologous recombination, oligonucleotide-directed mutagenesis, and meganuclease-mediated mutagenesis. In one embodiment, TILLING is used. This is a mutagenesis technology that can be used to generate and/or identify polynucleotides encoding polypeptides with modified expression and/or activity. TILLING also allows selection of plants carrying such mutants. TILLING combines high-density mutagenesis with high-throughput screening methods. Methods for TILLING are well known in the art (see McCallum et al., (2000) Nat Biotechnol 18: 455-457 and Stemple (2004) Nat Rev Genet 5(2): 145-50).

[0153] Specific mutations in polynucleotides can be created that can result in modulated gene expression, modulated stability of mRNA, or modulated stability of protein. Such plants are referred to herein as “non-naturally occurring” or “mutant” plants. Typically, the mutant or non-naturally occurring plants will include at least a portion of foreign or synthetic or man-made nucleic acid (for example, DNA or RNA) that was not present in the plant before it was manipulated. The foreign nucleic acid may be a single nucleotide, two or more nucleotides, two or more contiguous nucleotides or two or more non-contiguous nucleotides—such as at least 10, 20, 30, 40, 50, 100, 200, 300, 400, 500, 600, 700, 800, 900, 1000, 1100, 1200, 1300, 1400 or 1500 or more contiguous or non-contiguous nucleotides.

[0154] The mutant or non-naturally occurring plants or plant cells can have any combination of one or more mutations in one or more genes which results in modulated protein levels. For example, the mutant or non-naturally occurring plants or plant cells may have a single mutation in a single gene; multiple mutations in a single gene; a single mutation in two or more or three or more or four or more genes; or multiple mutations in two or more or three or more or four or more genes. Examples of such mutations are described herein. By way of further example, the mutant or non-naturally occurring plants or plant cells may have one or more mutations in a specific portion of the gene(s)—such as in a region of the gene that encodes an active site of the protein or a portion thereof. By way of further example, the mutant or non-naturally occurring plants or plant cells may have one or more mutations in a region outside of one or more gene(s)—such as in a region upstream or downstream of the gene it regulates provided that they modulate the activity or expression of the gene(s). Upstream elements can include promoters, enhancers or transription factors. Some elements—such as enhancers—can be positioned upstream or downstream of the gene it regulates. The element(s) need not be located near to the gene that it regulates since some elements have been found located several hundred thousand base pairs upstream or downstream of the gene that it regulates. The mutant or non-naturally occurring plants or plant cells may have one or more mutations located within the first 100 nucleotides of the gene(s), within the first 200 nucleotides of the gene(s), within the first 300 nucleotides of the gene(s), within the first 400 nucleotides of the gene(s), within the first 500 nucleotides of the gene(s), within the first 600 nucleotides of the gene(s), within the first 700 nucleotides of the gene(s), within the first 800 nucleotides of the gene(s), within the first 900 nucleotides of the gene(s), within the first 1000 nucleotides of the gene(s), within the first 1100 nucleotides of the gene(s), within the first 1200 nucleotides of the gene(s), within the first 1300 nucleotides of the gene(s), within the first 1400 nucleotides of the gene(s) or within the first 1500 nucleotides of the gene(s). The mutant or non-naturally occurring plants or plant cells may have one or more mutations located within the first, second, third, fourth, fifth, sixth, seventh, eighth, ninth, tenth, eleventh, twelfth, thirteenth, fourteenth or fifteenth set of 100 nucleotides of the gene(s) or combinations thereof. Mutant or non-naturally occurring plants or plant cells (for example, mutant, non-naturally occurring or transgenic plants or plant cells and the like, as described herein) comprising the mutant polypeptide variants are disclosed.

[0155] In one embodiment, seeds from plants are mutagenised and then grown into first generation mutant plants. The first generation plants are then allowed to self-pollinate and seeds from the first generation plant are grown into second generation plants, which are then screened for mutations in their loci. Though the mutagenized plant material can be screened for mutations, an advantage of screening the second generation plants is that all somatic mutations correspond to germline mutations. One of skill in the art would understand that a variety of plant materials, including but not limited to, seeds, pollen, plant tissue or plant cells, may be mutagenised in order to create the mutant plants. However, the type of plant material mutagenised may affect when the plant nucleic acid is screened for mutations. For example, when pollen is subjected to mutagenesis prior to pollination of a non-mutagenized plant the seeds resulting from that pollination are grown into first generation plants. Every cell of the first generation plants will contain mutations created in the pollen; thus these first generation plants may then be screened for mutations instead of waiting until the second generation.

[0156] Mutagens that create primarily point mutations and short deletions, insertions, transversions, and or transitions, including chemical mutagens or radiation, may be used to create the mutations. Mutagens include, but are not limited to, ethyl methanesulfonate, methylmethane sulfonate, N-ethyl-N-nitrosurea, triethylmelamine, N-methyl-N-nitrosourea, procarbazine, chlorambucil, cyclophosphamide, diethyl sulfate, acrylamide monomer, melphalan, nitrogen mustard, vincristine, dimethylnitrosamine, N-methyl-N′-nitro-Nitrosoguanidine, nitrosoguanidine, 2-aminopurine, 7,12 dimethyl-benz(a)anthracene, ethylene oxide, hexamethylphosphoramide, bisulfan, diepoxyalkanes (diepoxyoctane, diepoxybutane, and the like), 2-methoxy-6-chloro-9[3-(ethyl-2-chloro-ethyl)aminopropylamino]acridine dihydrochloride and formaldehyde.

[0157] Spontaneous mutations in the locus that may not have been directly caused by the mutagen are also contemplated provided that they result in the desired phenotype. Suitable mutagenic agents can also include, for example, ionising radiation—such as X-rays, gamma rays, fast neutron irradiation and UV radiation. Any method of plant nucleic acid preparation known to those of skill in the art may be used to prepare the plant nucleic acid for mutation screening.

[0158] Prepared nucleic acid from individual plants, plant cells, or plant material can optionally be pooled in order to expedite screening for mutations in the population of plants originating from the mutagenized plant tissue, cells or material. One or more subsequent generations of plants, plant cells or plant material can be screened. The size of the optionally pooled group is dependent upon the sensitivity of the screening method used.

[0159] After the nucleic acid samples are optionally pooled, they can be subjected to polynucleotide-specific amplification techniques, such as Polymerase Chain Reaction. Any one or more primers or probes specific to the gene or the sequences immediately adjacent to the gene may be utilized to amplify the sequences within the optionally pooled nucleic acid sample. Suitably, the one or more primers or probes are designed to amplify the regions of the locus where useful mutations are most likely to arise. Most preferably, the primer is designed to detect mutations within regions of the polynucleotide. Additionally, it is preferable for the primer(s) and probe(s) to avoid known polymorphic sites in order to ease screening for point mutations. To facilitate detection of amplification products, the one or more primers or probes may be labelled using any conventional labelling method. Primer(s) or probe(s) can be designed based upon the sequences described herein using methods that are well understood in the art.

[0160] To facilitate detection of amplification products, the primer(s) or probe(s) may be labelled using any conventional labelling method. These can be designed based upon the sequences described herein using methods that are well understood in the art. Polymorphisms may be identified by means known in the art and some have been described in the literature.

[0161] In a further aspect there is provided a method of preparing a mutant plant. The method involves providing at least one cell of a plant comprising a gene encoding a functional polynucleotide described herein (or any combination thereof as described herein). Next, the at least one cell of the plant is treated under conditions effective to modulate the activity of the polynucleotide(s) described herein. The at least one mutant plant cell is then propagated into a mutant plant, where the mutant plant has a modulated level of polypeptide(s) described (or any combination thereof as described herein) as compared to that of a control plant. In one embodiment of this method of making a mutant plant, the treating step involves subjecting the at least one cell to a chemical mutagenising agent as described above and under conditions effective to yield at least one mutant plant cell. In another embodiment of this method, the treating step involves subjecting the at least one cell to a radiation source under conditions effective to yield at least one mutant plant cell. The term “mutant plant” includes mutants plants in which the genotype is modified as compared to a control plant, suitably by means other than genetic engineering or genetic modification.

[0162] In certain embodiments, the mutant plant, mutant plant cell or mutant plant material may comprise one or more mutations that have occurred naturally in another plant, plant cell or plant material and confer a desired trait. This mutation can be incorporated (for example, introgressed) into another plant, plant cell or plant material (for example, a plant, plant cell or plant material with a different genetic background to the plant from which the mutation was derived) to confer the trait thereto. Thus by way of example, a mutation that occurred naturally in a first plant may be introduced into a second plant—such as a second plant with a different genetic background to the first plant. The skilled person is therefore able to search for and identify a plant carrying naturally in its genome one or more mutant alleles of the genes described herein which confer a desired trait. The mutant allele(s) that occurs naturally can be transferred to the second plant by various methods including breeding, backcrossing and introgression to produce a lines, varieties or hybrids that have one or more mutations in the genes described herein. Plants showing a desired trait may be screened out of a pool of mutant plants. Suitably, the selection is carried out utilising the knowledge of the nucleotide sequences as described herein. Consequently, it is possible to screen for a genetic trait as compared to a control. Such a screening approach may involve the application of conventional nucleic acid amplification and/or hybridization techniques as discussed herein. Thus, a further aspect of the present invention relates to a method for identifying a mutant plant comprising the steps of: (a) providing a sample comprising nucleic acid from a plant; and (b) determining the nucleic acid sequence of the polynucleotide, wherein a difference in the sequence of the polynucleotide as compared to the polynucleotide sequence of a control plant is indicative that said plant is a mutant plant. In another aspect there is provided a method for identifying a mutant plant which accumulates increased or reduced levels of protease as compared to a control plant comprising the steps of: (a) providing a sample from a plant to be screened; (b) determining if said sample comprises one or more mutations in one or more of the polynucleotides described herein; and (c) determining at least the protease content of said plant during or after a curing procedure.

[0163] In another aspect there is provided a method for preparing a mutant plant which has increased or reduced levels of protease as compared to a control plant comprising the steps of: (a) providing a sample from a first plant; (b) determining if said sample comprises one or more mutations in one or more the polynucleotides described herein that result in modulated levels of a protease; and (c) transferring the one or more mutations into a second plant. Suitably at least the protease content is determined in cured leaf material. The mutation(s) can be transferred into the second plant using various methods that are known in the art—such as by genetic engineering, genetic manipulation, introgression, plant breeding, backcrossing and the like. In one embodiment, the first plant is a naturally occurring plant. In one embodiment, the second plant has a different genetic background to the first plant.

[0164] In another aspect there is provided a method for preparing a mutant plant which has increased or reduced levels of a protease as compared to a control plant comprising the steps of: (a) providing a sample from a first plant; (b) determining if said sample comprises one or more mutations in one or more of the polynucleotides described herein that results in modulated levels of the protease; and (c) introgressing the one or more mutations from the first plant into a second plant. Suitably at least the protease content is determined in cured leaf material. In one embodiment, the step of introgressing comprises plant breeding, optionally including backcrossing and the like. In one embodiment, the first plant is a naturally occurring plant. In one embodiment, the second plant has a different genetic background to the first plant. In one embodiment, the first plant is not a cultivar or an elite cultivar. In one embodiment, the second plant is a cultivar or an elite cultivar. A further aspect relates to a mutant plant (including a cultivar or elite cultivar mutant plant) obtained or obtainable by the methods described herein. In certain embodiments, the “mutant plants” may have one or more mutations localised only to a specific region of the plant—such as within the sequence of the one or more polynucleotide(s) described herein. According to this embodiment, the remaining genomic sequence of the mutant plant will be the same or substantially the same as the plant prior to the mutagenesis.

[0165] In certain embodiments, the mutant plants may have one or more mutations localised in more than one region of the plant—such as within the sequence of one or more of the polynucleotides described herein and in one or more further regions of the genome. According to this embodiment, the remaining genomic sequence of the mutant plant will not be the same or will not be substantially the same as the plant prior to the mutagenesis. In certain embodiments, the mutant plants may not have one or more mutations in one or more, two or more, three or more, four or more or five or more exons of the polynucleotide(s) described herein; or may not have one or more mutations in one or more, two or more, three or more, four or more or five or more introns of the polynucleotide(s) described herein; or may not have one or more mutations in a promoter of the polynucleotide(s) described herein; or may not have one or more mutations in the 3′ untranslated region of the polynucleotide(s) described herein; or may not have one or more mutations in the 5′ untranslated region of the polynucleotide(s) described herein; or may not have one or more mutations in the coding region of the polynucleotide(s) described herein; or may not have one or more mutations in the non-coding region of the polynucleotide(s) described herein; or any combination of two or more, three or more, four or more, five or more; or six or more thereof parts thereof.

[0166] In a further aspect there is provided a method of identifying a plant, a plant cell or plant material comprising a mutation in a gene encoding a polynucleotide described herein comprising: (a) subjecting a plant, a plant cell or plant material to mutagenesis; (b) obtaining a nucleic acid sample from said plant, plant cell or plant material or descendants thereof; and (c) determining the nucleic acid sequence of the gene encoding a polynucleotide described herein or a variant or a fragment thereof, wherein a difference in said sequence is indicative of one or more mutations therein.

[0167] Zinc finger proteins can be used to modulate the expression or the activity of one or more of the polynucleotides described herein. In various embodiments, a genomic DNA sequence comprising a part of or all of the coding sequence of the polynucleotide is modified by zinc finger nuclease-mediated mutagenesis. The genomic DNA sequence is searched for a unique site for zinc finger protein binding. Alternatively, the genomic DNA sequence is searched for two unique sites for zinc finger protein binding wherein both sites are on opposite strands and close together, for example, 1, 2, 3, 4, 5, 6 or more basepairs apart. Accordingly, zinc finger proteins that bind to polynucleotides are provided.

[0168] A zinc finger protein may be engineered to recognize a selected target site in a gene. A zinc finger protein can comprise any combination of motifs derived from natural zinc finger DNA-binding domains and non-natural zinc finger DNA-binding domains by truncation or expansion or a process of site-directed mutagenesis coupled to a selection method such as, but not limited to, phage display selection, bacterial two-hybrid selection or bacterial one-hybrid selection. The term “non-natural zinc finger DNA-binding domain” refers to a zinc finger DNA-binding domain that binds a three-base pair sequence within the target nucleic acid and that does not occur in the cell or organism comprising the nucleic acid which is to be modified. Methods for the design of zinc finger protein which binds specific nucleotide sequences which are unique to a target gene are known in the art.

[0169] In other embodiments, a zinc finger protein may be selected to bind to a regulatory sequence of a polynucleotide. More specifically, the regulatory sequence may comprise a transcription initiation site, a start codon, a region of an exon, a boundary of an exon-intron, a terminator, or a stop codon. Accordingly, the invention provides a mutant, non-naturally occurring or transgenic plant or plant cells, produced by zinc finger nuclease-mediated mutagenesis in the vicinity of or within one or more polynucleotides described herein, and methods for making such a plant or plant cell by zinc finger nuclease-mediated mutagenesis. Methods for delivering zinc finger protein and zinc finger nuclease to a tobacco plant are similar to those described below for delivery of meganuclease.

[0170] Plants suitable for use in genetic modification include, but are not limited to, monocotyledonous and dicotyledonous plants and plant cell systems, including species from one of the following families: Acanthaceae, Alliaceae, Alstroemeriaceae, Amaryllidaceae, Apocynaceae, Arecaceae, Asteraceae, Berberidaceae, Bixaceae, Brassicaceae, Bromeliaceae, Cannabaceae, Caryophyllaceae, Cephalotaxaceae, Chenopodiaceae, Colchicaceae, Cucurbitaceae, Dioscoreaceae, Ephedraceae, Erythroxylaceae, Euphorbiaceae, Fabaceae, Lamiaceae, Linaceae, Lycopodiaceae, Malvaceae, Melanthiaceae, Musaceae, Myrtaceae, Nyssaceae, Papaveraceae, Pinaceae, Plantaginaceae, Poaceae, Rosaceae, Rubiaceae, Salicaceae, Sapindaceae, Solanaceae, Taxaceae, Theaceae, or Vitaceae.

[0171] Suitable species may include members of the genera Abelmoschus, Abies, Acer, Agrostis, Allium, Alstroemeria, Ananas, Andrographis, Andropogon, Artemisia, Arundo, Atropa, Berberis, Beta, Bixa, Brassica, Calendula, Camellia, Camptotheca, Cannabis, Capsicum, Carthamus, Catharanthus, Cephalotaxus, Chrysanthemum, Cinchona, Citrullus, Coffea, Colchicum, Coleus, Cucumis, Cucurbita, Cynodon, Datura, Dianthus, Digitalis, Dioscorea, Elaeis, Ephedra, Erianthus, Erythroxylum, Eucalyptus, Festuca, Fragaria, Galanthus, Glycine, Gossypium, Helianthus, Hevea, Hordeum, Hyoscyamus, Jatropha, Lactuca, Linum, Lolium, Lupinus, Lycopersicon, Lycopodium, Manihot, Medicago, Mentha, Miscanthus, Musa, Nicotiana, Oryza, Panicum, Papaver, Parthenium, Pennisetum, Petunia, Phalaris, Phleum, Pinus, Poa, Poinsettia, Populus, Rauwolfia, Ricinus, Rosa, Saccharum, Salix, Sanguinaria, Scopolia, Secale, Solanum, Sorghum, Spartina, Spinacea, Tanacetum, Taxus, Theobroma, Triticosecale, Triticum, Uniola, Veratrum, Vinca, Vitis, and Zea.

[0172] Suitable species may include Panicum spp., Sorghum spp., Miscanthus spp., Saccharum spp., Erianthus spp., Populus spp., Andropogon gerardii (big bluestem), Pennisetum purpureum (elephant grass), Phalaris arundinacea (reed canarygrass), Cynodon dactylon (bermudagrass), Festuca arundinacea (tall fescue), Spartina pectinata (prairie cord-grass), Medicago sativa (alfalfa), Arundo donax (giant reed), Secale cereale (rye), Salix spp. (willow), Eucalyptus spp. (eucalyptus), Triticosecale (tritic wheat times rye), bamboo, Helianthus annuus (sunflower), Carthamus tinctorius (safflower), Jatropha curcas (jatropha), Ricinus communis (castor), Elaeis guineensis (palm), Linum usitatissimum (flax), Brassica juncea, Beta vulgaris (sugarbeet), Manihot esculenta (cassaya), Lycopersicon esculentum (tomato), Lactuca sativa (lettuce), Musyclise alca (banana), Solanum tuberosum (potato), Brassica oleracea (broccoli, cauliflower, Brussels sprouts), Camellia sinensis (tea), Fragaria ananassa (strawberry), Theobroma cacao (cocoa), Coffe35ycliseca (coffee), Vitis vinifera (grape), Ananas comosus (pineapple), Capsicum annum (hot & sweet pepper), Allium cepa (onion), Cucumis melo (melon), Cucumis sativus (cucumber), Cucurbita maxima (squash), Cucurbita moschata (squash), Spinacea oleracea (spinach), Citrullus lanatus (watermelon), Abelmoschus esculentus (okra), Solanum melongena (eggplant), Rosa spp. (rose), Dianthus caryophyllus (carnation), Petunia spp. (petunia), Poinsettia pulcherrima (poinsettia), Lupinus albus (lupin), Uniola paniculata (oats), bentgrass (Agrostis spp.), Populus tremuloides (aspen), Pinus spp. (pine), Abies spp. (fir), Acer spp. (maple), Hordeum vulgare (barley), Poa pratensis (bluegrass), Lolium spp. (ryegrass) and Phleum pratense (timothy), Panicum virgatum (switchgrass), Sorghu35yclise35or (sorghum, sudangrass), Miscanthus giganteus (miscanthus), Saccharum sp. (energycane), Populus balsamifera (poplar), Zea mays (corn), Glycine max (soybean), Brassica napus (canola), Triticum aestivum (wheat), Gossypium hirsutum (cotton), Oryza sativa (rice), Helianthus annuus (sunflower), Medicago sativa (alfalfa), Beta vulgaris (sugarbeet), or Pennisetum glaucum (pearl millet).

[0173] Various embodiments are directed to mutant tobacco, non-naturally occurring tobacco or transgenic tobacco plants or plant cells modified to modulate gene expression levels thereby producing a plant or plant cell—such as a tobacco plant or plant cell—in which the expression level of a polypeptide is modulated within tissues of interest as compared to a control. The disclosed compositions and methods can be applied to any species of the genus Nicotiana, including N. rustica and N. tabacum (for example, LA B21, LN KY171, TI 1406, Basma, Galpao, Perique, Beinhart 1000-1, and Petico). Other species include N. acaulis, N. acuminata, N. africana, N. alata, N. ameghinoi, N. amplexicaulis, N. arentsii, N. attenuata, N. azambujae, N. benavidesii, N. benthamiana, N. bigelovii, N. bonariensis, N. cavicola, N. clevelandii, N. cordifolia, N. corymbosa, N. debneyi, N. excelsior, N. forgetiana, N. fragrans, N. glauca, N. glutinosa, N. goodspeedii, N. gossei, N. hybrid, N. ingulba, N. kawakamii, N. knightiana, N. langsdorffii, N. linearis, N. longiflora, N. maritima, N. megalosiphon, N. miersii, N. noctiflora, N. nudicaulis, N. obtusifolia, N. occidentalis, N. occidentalis subsp. hesperis, N. otophora, N. paniculata, N. pauciflora, N. petunioides, N. plumbaginifolia, N. quadrivalvis, N. raimondii, N. repanda, N. rosulata, N. rosulata subsp. ingulba, N. rotundifolia, N. setcheffii, N. simulans, N. solanifolia, N. spegazzinii, N. stocktonii, N. suaveolens, N. sylvestris, N. thyrsiflora, N. tomentosa, N. tomentosiformis, N. trigonophylla, N. umbratica, N. undulata, N. velutina, N. wigandioides, and N. x sanderae.

[0174] The use of tobacco cultivars and elite tobacco cultivars is also contemplated herein. The transgenic, non-naturally occurring or mutant plant may therefore be a tobacco variety or elite tobacco cultivar that comprises one or more transgenes, or one or more genetic mutations or a combination thereof. The genetic mutation(s) (for example, one or more polymorphisms) can be mutations that do not exist naturally in the individual tobacco variety or tobacco cultivar (for example, elite tobacco cultivar) or can be genetic mutation(s) that do occur naturally provided that the mutation does not occur naturally in the individual tobacco variety or tobacco cultivar (for example, elite tobacco cultivar).

[0175] Particularly useful Nicotiana tabacum varieties include Burley type, dark type, flue-cured type, and Oriental type tobaccos. Non-limiting examples of varieties or cultivars are: BD 64, CC 101, CC 200, CC 27, CC 301, CC 400, CC 500, CC 600, CC 700, CC 800, CC 900, Coker 176, Coker 319, Coker 371 Gold, Coker 48, CD 263, DF911, DT 538 LC Galpao tobacco, GL 26H, GL 350, GL 600, GL 737, GL 939, GL 973, HB 04P, HB 04P LC, HB3307PLC, Hybrid 403LC, Hybrid 404LC, Hybrid 501 LC, K 149, K 326, K 346, K 358, K394, K 399, K 730, KDH 959, KT 200, KT204LC, KY10, KY14, KY 160, KY 17, KY 171, KY 907, KY907LC, KY14xL8 LC, Little Crittenden, McNair 373, McNair 944, msKY 14xL8, Narrow Leaf Madole, Narrow Leaf Madole LC, NBH 98, N-126, N-777LC, N-7371LC, NC 100, NC 102, NC 2000, NC 291, NC 297, NC 299, NC 3, NC 4, NC 5, NC 6, NC7, NC 606, NC 71, NC 72, NC 810, NC BH 129, NC 2002, Neal Smith Madole, OXFORD 207, PD 7302 LC, PD 7309 LC, PD 7312 LC, ‘Perique’ tobacco, PVH03, PVH09, PVH19, PVH50, PVH51, R 610, R 630, R 7-11, R 7-12, RG 17, RG 81, RG H51, RGH 4, RGH 51, RS 1410, Speight 168, Speight 172, Speight 179, Speight 210, Speight 220, Speight 225, Speight 227, Speight 234, Speight G-28, Speight G-70, Speight H-6, Speight H20, Speight NF3, TI 1406, TI 1269, TN 86, TN86LC, TN 90, TN 97, TN97LC, TN D94, TN D950, TR (Tom Rosson) Madole, VA 309, VA359, AA 37-1, B13P, Xanthi (Mitchell-Mor), Bel-W3, 79-615, Samsun Holmes NN, KTRDC number 2 Hybrid 49, Burley 21, KY8959, KY9, MD 609, PG01, PG04, P01, P02, P03, RG11, RG 8, VA509, AS44, Banket A1, Basma Drama B84/31, Basma I Zichna ZP4/B, Basma Xanthi BX 2A, Batek, Besuki Jember, 0104, Coker 347, Criollo Misionero, Delcrest, Djebel 81, DVH 405, Galpão Comum, HBO4P, Hicks Broadleaf, Kabakulak Elassona, Kutsage E1, LA BU 21, NC 2326, NC 297, PVH 2110, Red Russian, Samsun, Saplak, Simmaba, Talgar 28, Wislica, Yayaldag, Prilep HC-72, Prilep P23, Prilep PB 156/1, Prilep P12-2/1, Yaka JK-48, Yaka JB 125/3, TI-1068, KDH-960, TI-1070, TW136, Basma, TKF 4028, L8, TKF 2002, GR141, Basma xanthi, GR149, GR153, Petit Havana. Low converter subvarieties of the above, even if not specifically identified herein, are also contemplated.

[0176] Embodiments are also directed to compositions and methods for producing mutant plants, non-naturally occurring plants, hybrid plants, or transgenic plants that have been modified to modulate the expression or activity of a polynucleotide(s) described herein (or any combination thereof as described herein). Advantageously, the mutant plants, non-naturally occurring plants, hybrid plants, or transgenic plants that are obtained may be similar or substantially the same in overall appearance to control plants. Various phenotypic characteristics such as degree of maturity, number of leaves per plant, stalk height, leaf insertion angle, leaf size (width and length), internode distance, and lamina-midrib ratio can be assessed by field observations.

[0177] One aspect relates to a seed of a mutant plant, a non-naturally occurring plant, a hybrid plant or a transgenic plant described herein. Preferably, the seed is a tobacco seed. A further aspect relates to pollen or an ovule of a mutant plant, a non-naturally occurring plant, a hybrid plant or a transgenic plant that is described herein. In addition, there is provided a mutant plant, a non-naturally occurring plant, a hybrid plant or a transgenic plant as described herein which further comprises a nucleic acid conferring male sterility.

[0178] Also provided is a tissue culture of regenerable cells of the mutant plant, non-naturally occurring plant, hybrid plant, or transgenic plant or a part thereof as described herein, which culture regenerates plants capable of expressing all the morphological and physiological characteristics of the parent. The regenerable cells include but are not limited to cells from leaves, pollen, embryos, cotyledons, hypocotyls, roots, root tips, anthers, flowers and a part thereof, ovules, shoots, stems, stalks, pith and capsules or callus or protoplasts derived therefrom.

[0179] A still further aspect, relates to a cured plant material—such as cured leaf or cured tobacco—derived or derivable from a mutant, non-naturally occurring or transgenic plant or cell, wherein expression of one or more of the polynucleotides described herein or the activity of the protein encoded thereby is modulated.

[0180] Suitably the visual appearance of said plant (for example, leaf) is substantially the same as the control plant. Suitably, the plant is a tobacco plant.

[0181] Embodiments are also directed to compositions and methods for producing mutant, non-naturally occurring or transgenic plants or plant cells that have been modified to modulate the expression or activity of the one or more of the polynucleotides or polypeptides described herein which can result in plants or plant components (for example, leaves—such as green leaves or cured leaves—or tobacco) or plant cells with modulated levels of proteases.

[0182] In another aspect, there is provided a method for modulating (eg. increasing) the amount of protease in at least a part of a plant (for example, the leaves—such as cured leaves—or in tobacco), comprising the steps of: (i) modulating (eg. increasing) the expression or activity of an one or more of the polypeptides described herein (or any combination thereof as described herein), suitably, wherein the polypeptide(s) is encoded by the corresponding polynucleotide sequence described herein; (ii) measuring the protease content in at least a part (for example, the leaves—such as cured leaves—or tobacco or in smoke) of the mutant, non-naturally occurring or transgenic plant obtained in step (i); and (iii) identifying a mutant, non-naturally occurring or transgenic plant in which the protease content therein has been modulated (eg. increased) in comparison to a control plant. Suitably, the visual appearance of said mutant, non-naturally occurring or transgenic plant is substantially the same as the control plant. Suitably, the plant is a tobacco plant.

[0183] In another aspect, there is provided a method for modulating (eg. increasing) the amount of protease in at least a part of cured plant material—such as cured leaf—comprising the steps of: (i) modulating (eg. increasing) the expression or activity of an one or more of the polypeptides (or any combination thereof as described herein), suitably, wherein the polypeptide(s) is encoded by the corresponding polynucleotide sequence described herein; (ii) harvesting plant material—such as one or more of the leaves—and curing for a period of time; (iii) measuring the protease content in at least a part of the cured plant material obtained in step (ii) or during step (ii); and (iv) identifying cured plant material in which the protease content therein has been modulated (eg. increased) in comparison to a control plant.

[0184] An increase in expression as compared to the control may be from about 5% to about 100%, or an increase of at least 10%, at least 20%, at least 25%, at least 30%, at least 40%, at least 50%, at least 60%, at least 70%, at least 75%, at least 80%, at least 90%, at least 95%, at least 98%, or 100% or more—such as 200%, 300%, 500%, 1000% or more, which includes an increase in transcriptional activity or polynucleotide expression or polypeptide expression or a combination thereof.

[0185] An increase in activity as compared to a control may be from about 5% to about 100%, or an increase of at least 10%, at least 20%, at least 25%, at least 30%, at least 40%, at least 50%, at least 60%, at least 70%, at least 75%, at least 80%, at least 90%, at least 95%, at least 98%, or 100% or more—such as 200%, 300%, 500%, 1000% or more.

[0186] A reduction in expression as compared to a control may be from about 5% to about 100%, or a reduction of at least 10%, at least 20%, at least 25%, at least 30%, at least 40%, at least 50%, at least 60%, at least 70%, at least 75%, at least 80%, at least 90%, at least 95%, at least 98%, or 100%, which includes a reduction in transcriptional activity or polynucleotide expression or polypeptide expression or a combination thereof.

[0187] A reduction in activity as compared to a control may be from about 5% to about 100%, or a reduction of at least 10%, at least 20%, at least 25%, at least 30%, at least 40%, at least 50%, at least 60%, at least 70%, at least 75%, at least 80%, at least 90%, at least 95%, at least 98%, or 100%.

[0188] Polynucleotides and recombinant constructs described herein can be used to modulate the expression of the proteases described herein in a plant species of interest, suitably tobacco. A number of polynucleotide based methods can be used to increase gene expression in plants and plant cells. By way of example, a construct, vector or expression vector that is compatible with the plant to be transformed can be prepared which comprises the gene of interest together with an upstream promoter that is capable of overexpressing the gene in the plant or plant cell. Exemplary promoters are described herein. Following transformation and when grown under suitable conditions, the promoter can drive expression in order to modulate (for example, reduce) the levels of this enzyme in the plant, or in a specific tissue thereof. In one exemplary embodiment, a vector carrying one or more polynucleotides described herein (or any combination thereof as described herein) is generated to overexpress the gene in a plant or plant cell. The vector carries a suitable promoter—such as the cauliflower mosaic virus CaMV 35S promoter—upstream of the transgene driving its constitutive expression in all tissues of the plant. The vector also carries an antibiotic resistance gene in order to confer selection of the transformed calli and cell lines.

[0189] In a preferred embodiment, a promoter and regulatory sequences are derived from one or more of SEQ ID Nos: 1-80. These regulatory sequences can be used in conjunction with cognate or non-cognate expression sequences to increase expression of said sequences in a tobacco plant during the curing procedure.

[0190] The expression of sequences from promoters can be enhanced by including expression control sequences, including enhancers, chromatin activating elements, transcription factor responsive elements and the like. Such control sequences may be constitutive, and upregulate transcription in a universal manner; or they may be facultative, and upregulate transcription in response to specific signals. Signals associated with senescence and signals which are active during the curing procedure are specifically indicated.

[0191] Various embodiments are therefore directed to methods for modulating (for example, increasing) the expression level of one or more polynucleotides described herein (or any combination thereof as described herein) by integrating multiple copies of the polynucleotide into a plant genome, comprising: transforming a plant cell host with an expression vector that comprises a promoter operably-linked to one or more polynucleotides described herein. The polypeptide encoded by a recombinant polynucleotide can be a native polypeptide, or can be heterologous to the cell.

[0192] A tobacco plant carrying a mutant allele of one or more polynucleotides described herein (or any combination thereof as described herein) can be used in a plant breeding program to create useful lines, varieties and hybrids. In particular, the mutant allele is introgressed into the commercially important varieties described above. Thus, methods for breeding plants are provided, that comprise crossing a mutant plant, a non-naturally occurring plant or a transgenic plant as described herein with a plant comprising a different genetic identity. The method may further comprise crossing the progeny plant with another plant, and optionally repeating the crossing until a progeny with the desirable genetic traits or genetic background is obtained. One purpose served by such breeding methods is to introduce a desirable genetic trait into other varieties, breeding lines, hybrids or cultivars, particularly those that are of commercial interest. Another purpose is to facilitate stacking of genetic modifications of different genes in a single plant variety, lines, hybrids or cultivars. Intraspecific as well as interspecific matings are contemplated. The progeny plants that arise from such crosses, also referred to as breeding lines, are examples of non-naturally occurring plants of the invention.

[0193] In one embodiment, a method is provided for producing a non-naturally occurring tobacco plant comprising: (a) crossing a mutant or transgenic tobacco plant with a second tobacco plant to yield progeny tobacco seed; (b) growing the progeny tobacco seed, under plant growth conditions, to yield the non-naturally occurring tobacco plant. The method may further comprises: (c) crossing the previous generation of non-naturally occurring tobacco plant with itself or another tobacco plant to yield progeny tobacco seed; (d) growing the progeny tobacco seed of step (c) under plant growth conditions, to yield additional non-naturally occurring tobacco plants; and (e) repeating the crossing and growing steps of (c) and (d) multiple times to generate further generations of non-naturally occurring tobacco plants. The method may optionally comprises prior to step (a), a step of providing a parent plant which comprises a genetic identity that is characterized and that is not identical to the mutant or transgenic plant. In some embodiments, depending on the breeding program, the crossing and growing steps are repeated from 0 to 2 times, from 0 to 3 times, from 0 to 4 times, 0 to 5 times, from 0 to 6 times, from 0 to 7 times, from 0 to 8 times, from 0 to 9 times or from 0 to 10 times, in order to generate generations of non-naturally occurring tobacco plants. Backcrossing is an example of such a method wherein a progeny is crossed with one of its parents or another plant genetically similar to its parent, in order to obtain a progeny plant in the next generation that has a genetic identity which is closer to that of one of the parents. Techniques for plant breeding, particularly tobacco plant breeding, are well known and can be used in the methods of the invention. The invention further provides non-naturally occurring tobacco plants produced by these methods. Certain embodiments exclude the step of selecting a plant.

[0194] In some embodiments of the methods described herein, lines resulting from breeding and screening for variant genes are evaluated in the field using standard field procedures. Control genotypes including the original unmutagenized parent are included and entries are arranged in the field in a randomized complete block design or other appropriate field design. For tobacco, standard agronomic practices are used, for example, the tobacco is harvested, weighed, and sampled for chemical and other common testing before and during curing. Statistical analyses of the data are performed to confirm the similarity of the selected lines to the parental line. Cytogenetic analyses of the selected plants are optionally performed to confirm the chromosome complement and chromosome pairing relationships. DNA fingerprinting, single nucleotide polymorphism, microsatellite markers, or similar technologies may be used in a marker-assisted selection (MAS) breeding program to transfer or breed mutant alleles of a gene into other tobaccos, as described herein. For example, a breeder can create segregating populations from hybridizations of a genotype containing a mutant allele with an agronomically desirable genotype. Plants in the F2 or backcross generations can be screened using a marker developed from a genomic sequence or a fragment thereof, using one of the techniques listed herein. Plants identified as possessing the mutant allele can be backcrossed or self-pollinated to create a second population to be screened. Depending on the expected inheritance pattern or the MAS technology used, it may be necessary to self-pollinate the selected plants before each cycle of backcrossing to aid identification of the desired individual plants. Backcrossing or other breeding procedure can be repeated until the desired phenotype of the recurrent parent is recovered.

[0195] In a breeding program, successful crosses yield F1 plants that are fertile. Selected F1 plants can be crossed with one of the parents, and the first backcross generation plants are self-pollinated to produce a population that is again screened for variant gene expression (for example, the null version of the gene). The process of backcrossing, self-pollination, and screening is repeated, for example, at least 4 times until the final screening produces a plant that is fertile and reasonably similar to the recurrent parent. This plant, if desired, is self-pollinated and the progeny are subsequently screened again to confirm that the plant exhibits variant gene expression. In some embodiments, a plant population in the F2 generation is screened for variant gene expression, for example, a plant is identified that fails to express a polypeptide due to the absence of the gene according to standard methods, for example, by using a PCR method with primers based upon the nucleotide sequence information for the polynucleotide(s) described herein (or any combination thereof as described herein).

[0196] Hybrid tobacco varieties can be produced by preventing self-pollination of female parent plants (that is, seed parents) of a first variety, permitting pollen from male parent plants of a second variety to fertilize the female parent plants, and allowing F1 hybrid seeds to form on the female plants. Self-pollination of female plants can be prevented by emasculating the flowers at an early stage of flower development. Alternatively, pollen formation can be prevented on the female parent plants using a form of male sterility. For example, male sterility can be produced by cytoplasmic male sterility (CMS), or transgenic male sterility wherein a transgene inhibits microsporogenesis and/or pollen formation, or self-incompatibility. Female parent plants containing CMS are particularly useful. In embodiments in which the female parent plants are CMS, pollen is harvested from male fertile plants and applied manually to the stigmas of CMS female parent plants, and the resulting F1 seed is harvested.

[0197] Varieties and lines described herein can be used to form single-cross tobacco F1 hybrids. In such embodiments, the plants of the parent varieties can be grown as substantially homogeneous adjoining populations to facilitate natural cross-pollination from the male parent plants to the female parent plants. The F1 seed formed on the female parent plants is selectively harvested by conventional means. One also can grow the two parent plant varieties in bulk and harvest a blend of F1 hybrid seed formed on the female parent and seed formed upon the male parent as the result of self-pollination. Alternatively, three-way crosses can be carried out wherein a single-cross F1 hybrid is used as a female parent and is crossed with a different male parent. As another alternative, double-cross hybrids can be created wherein the F1 progeny of two different single-crosses are themselves crossed.

[0198] A population of mutant, non-naturally occurring or transgenic plants can be screened or selected for those members of the population that have a desired trait or phenotype. For example, a population of progeny of a single transformation event can be screened for those plants having a desired level of expression or activity of the polypeptide(s) encoded thereby. Physical and biochemical methods can be used to identify expression or activity levels. These include Southern analysis or PCR amplification for detection of a polynucleotide; Northern blots, S1 RNase protection, primer-extension, or RT-PCR amplification for detecting RNA transcripts; enzymatic assays for detecting enzyme or ribozyme activity of polypeptides and polynucleotides; and protein gel electrophoresis, Western blots, immunoprecipitation, and enzyme-linked immunoassays to detect polypeptides. Other techniques such as in situ hybridization, enzyme staining, and immunostaining and enzyme assays also can be used to detect the presence or expression or activity of polypeptides or polynucleotides.

[0199] Mutant, non-naturally occurring or transgenic plant cells and plants are described herein comprising one or more recombinant polynucleotides, one or more polynucleotide constructs, one or more double-stranded RNAs, one or more conjugates or one or more vectors/expression vectors.

[0200] Without limitation, the plants described herein may be modified for other purposes either before or after the expression or activity has been modulated according to the present invention. One or more of the following genetic modifications can be present in the mutant, non-naturally occurring or transgenic plants. In one embodiment, one or more genes that are involved in the conversion of nitrogenous metabolic intermediates is modified resulting in plants (such as leaves) that when cured, produces lower levels of at least one tobacco-specific nitrosamine than control plants. Non-limiting examples of genes that can be modified includegenes encoding a nicotine demethylase, such as CYP82E4, CYP82E5 and CYP82E10 which participate in the conversion of nicotine to nornicotine and are described in WO2006091194, WO2008070274, WO2009064771 and PCT/US2011/021088 and as described in detail herein. In another embodiment, one or more genes that are involved in heavy metal uptake or heavy metal transport are modified resulting in plants or parts of plants (such as leaves) having a lower heavy metal content than control plants or parts thereof without the modification(s). Non-limiting examples include genes in the family of multidrug resistance associated proteins, the family of cation diffusion facilitators (CDF), the family of Zrt-, Irt-like proteins (ZIP), the family of cation exchangers (CAX), the family of copper transporters (COPT), the family of heavy-metal P-type ATPases (for example, HMAs, as described in WO2009074325), the family of homologs of natural resistance-associated macrophage proteins (NRAMP), and the family of ATP-binding cassette (ABC) transporters (for example, MRPs, as described in WO2012/028309, which participate in transport of heavy metals, such as cadmium. The term heavy metal as used herein includes transition metals. Examples of other modifications include herbicide tolerance, for example, glyphosate is an active ingredient of many broad spectrum herbicides. Glyphosate resistant transgenic plants have been developed by transferring the aroA gene (a glyphosate EPSP synthetase from Salmonella typhimurium and E. coli). Sulphonylurea resistant plants have been produced by transforming the mutant ALS (acetolactate synthetase) gene from Arabidopsis. OB protein of photosystem II from mutant Amaranthus hybridus has been transferred in to plants to produce atrazine resistant transgenic plants; and bromoxynil resistant transgenic plants have been produced by incorporating the bxn gene from the bacterium Klebsiella pneumoniae. Another exemplary modification results in plants that are resistant to insects. Bacillus thuringiensis (Bt) toxins can provide an effective way of delaying the emergence of Bt-resistant pests, as recently illustrated in broccoli where pyramided cry1Ac and cry1C Bt genes controlled diamondback moths resistant to either single protein and significantly delayed the evolution of resistant insects. Another exemplary modification results in plants that are resistant to diseases caused by pathogens (for example, viruses, bacteria, fungi). Plants expressing the Xa21 gene (resistance to bacterial blight) with plants expressing both a Bt fusion gene and a chitinase gene (resistance to yellow stem borer and tolerance to sheath) have been engineered. Another exemplary modification results in altered reproductive capability, such as male sterility. Another exemplary modification results in plants that are tolerant to abiotic stress (for example, drought, temperature, salinity), and tolerant transgenic plants have been produced by transferring acyl glycerol phosphate enzyme from Arabidopsis; genes coding mannitol dehydrogenase and sorbitol dehydrogenase which are involved in synthesis of mannitol and sorbitol improve drought resistance. Other exemplary modifications can result in plants with improved storage proteins and oils, plants with enhanced photosynthetic efficiency, plants with prolonged shelf life, plants with enhanced carbohydrate content, and plants resistant to fungi; plants encoding an enzyme involved in the biosynthesis of alkaloids. Transgenic plants in which the expression of S-adenosyl-L-methionine (SAM) and/or cystathionine gamma-synthase (CGS) has been modulated are also contemplated.

[0201] One or more such traits may be introgressed into the mutant, non-naturally occuring or transgenic tobacco plants from another tobacco cultivar or may be directly transformed into it. The introgression of the trait(s) into the mutant, non-naturally occuring or transgenic tobacco plants of the invention maybe achieved by any method of plant breeding known in the art, for example, pedigree breeding, backcrossing, doubled-haploid breeding, and the like (see, Wernsman, E. A, and Rufty, R. C. 1987. Chapter Seventeen. Tobacco. Pages 669-698 In: Cultivar Development. Crop Species. W. H. Fehr (ed.), MacMillan Publishing Co, Inc., New York, N.Y. 761 pp.). Molecular biology-based techniques described above, in particular RFLP and microsatelite markers, can be used in such backcrosses to identify the progenies having the highest degree of genetic identity with the recurrent parent. This permits one to accelerate the production of tobacco varieties having at least 90%, preferably at least 95%, more preferably at least 99% genetic identity with the recurrent parent, yet more preferably genetically identical to the recurrent parent, and further comprising the trait(s) introgressed from the donor parent. Such determination of genetic identity can be based on molecular markers known in the art.

[0202] The last backcross generation can be selfed to give pure breeding progeny for the nucleic acid(s) being transferred. The resulting plants generally have essentially all of the morphological and physiological characteristics of the mutant, non-naturally occuring or transgenic tobacco plants of the invention, in addition to the transferred trait(s) (for example, one or more single gene traits). The exact backcrossing protocol will depend on the trait being altered to determine an appropriate testing protocol. Although backcrossing methods are simplified when the trait being transferred is a dominant allele, a recessive allele may also be transferred. In this instance, it may be necessary to introduce a test of the progeny to determine if the desired trait has been successfully transferred.

[0203] Various embodiments provide mutant plants, non-naturally occurring plants or transgenic plants, as well as biomass in which the expression level of a polynucleotide (or any combination thereof as described herein) is modulated to modulate the protease activity therein.

[0204] Parts of such plants, particularly tobacco plants, and more particularly the leaf lamina and midrib of tobacco plants, can be incorporated into or used in making various consumable products including but not limited to aerosol forming materials, aerosol forming devices, smoking articles, smokable articles, smokeless products, and tobacco products. Examples of aerosol forming materials include but are not limited to tobacco compositions, tobaccos, tobacco extract, cut tobacco, cut filler, cured tobacco, expanded tobacco, homogenized tobacco, reconstituted tobacco, and pipe tobaccos. Smoking articles and smokable articles are types of aerosol forming devices. Examples of smoking articles or smokable articles include but are not limited to cigarettes, cigarillos, and cigars. Examples of smokeless products comprise chewing tobaccos, and snuffs. In certain aerosol forming devices, rather than combustion, a tobacco composition or another aerosol forming material is heated by one or more electrical heating elements to produce an aerosol. In another type of heated aerosol forming device, an aerosol is produced by the transfer of heat from a combustible fuel element or heat source to a physically separate aerosol forming material, which may be located within, around or downstream of the heat source. Smokeless tobacco products and various tobacco-containing aerosol forming materials may contain tobacco in any form, including as dried particles, shreds, granules, powders, or a slurry, deposited on, mixed in, surrounded by, or otherwise combined with other ingredients in any format, such as flakes, films, tabs, foams, or beads. As used herein, the term ‘smoke’ is used to describe a type of aerosol that is produced by smoking articles, such as cigarettes, or by combusting an aerosol forming material.

[0205] In one embodiment, there is also provided cured plant material from the mutant, transgenic and non-naturally occurring tobacco plants described herein. Processes of curing green tobacco leaves are known by those having skills in the art and include without limitation air-curing, fire-curing, flue-curing and sun-curing as described herein.

[0206] In another embodiment, there is described tobacco products including tobacco-containing aerosol forming materials comprising plant material—such as leaves, preferably cured leaves—from the mutant tobacco plants, transgenic tobacco plants or non-naturally occurring tobacco plants described herein. The tobacco products described herein can be a blended tobacco product which may further comprise unmodified tobacco.

[0207] The mutant, non-naturally occurring or transgenic plants may have other uses in, for example, agriculture. For example, mutant, non-naturally occurring or transgenic plants described herein can be used to make animal feed and human food products.

[0208] The invention also provides methods for producing seeds comprising cultivating the mutant plant, non-naturally occurring plant, or transgenic plant described herein, and collecting seeds from the cultivated plants. Seeds from plants described herein can be conditioned and bagged in packaging material by means known in the art to form an article of manufacture. Packaging material such as paper and cloth are well known in the art. A package of seed can have a label, for example, a tag or label secured to the packaging material, a label printed on the package that describes the nature of the seeds therein.

[0209] Compositions, methods and kits for genotyping plants for identification, selection, or breeding can comprise a means of detecting the presence of a polynucleotide (or any combination thereof as described herein) in a sample of polynucleotide. Accordingly, a composition is described comprising one of more primers for specifically amplifying at least a portion of one or more of the polynucleotides and optionally one or more probes and optionally one or more reagents for conducting the amplification or detection.

[0210] Accordingly, gene specific oligonucleotide primers or probes comprising about 10 or more contiguous polynucleotides corresponding to the polynucleotide(s) described herein are disclosed. Said primers or probes may comprise or consist of about 15, 20, 25, 30, 40, 45 or 50 more contiguous polynucleotides that hybridise (for example, specifically hybridise) to the polynucleotide(s) described herein. In some embodiments, the primers or probes may comprise or consist of about 10 to 50 contiguous nucleotides, about 10 to 40 contiguous nucleotides, about 10 to 30 contiguous nucleotides or about 15 to 30 contiguous nucleotides that may be used in sequence-dependent methods of gene identification (for example, Southern hybridization) or isolation (for example, in situ hybridization of bacterial colonies or bacteriophage plaques) or gene detection (for example, as one or more amplification primers in nucleic acid amplification or detection). The one or more specific primers or probes can be designed and used to amplify or detect a part or all of the polynucleotide(s). By way of specific example, two primers may be used in a polymerase chain reaction protocol to amplify a nucleic acid fragment encoding a nucleic acid—such as DNA or RNA. The polymerase chain reaction may also be performed using one primer that is derived from a nucleic acid sequence and a second primer that hybridises to the sequence upstream or downstream of the nucleic acid sequence—such as a promoter sequence, the 3′ end of the mRNA precursor or a sequence derived from a vector. Examples of thermal and isothermal techniques useful for in vitro amplification of polynucleotides are well known in the art. The sample may be or may be derived from a plant, a plant cell or plant material or a tobacco product made or derived from the plant, the plant cell or the plant material as described herein.

[0211] In a further aspect, there is also provided a method of detecting a polynucleotide(s) described herein (or any combination thereof as described herein) in a sample comprising the step of: (a) providing a sample comprising, or suspected of comprising, a polynucleotide; (b) contacting said sample with one of more primers or one or more probes for specifically detecting at least a portion of the polynucleotide(s); and (c) detecting the presence of an amplification product, wherein the presence of an amplification product is indicative of the presence of the polynucleotide(s) in the sample. In a further aspect, there is also provided the use of one of more primers or probes for specifically detecting at least a portion of the polynucleotide(s). Kits for detecting at least a portion of the polynucleotide(s) are also provided which comprise one of more primers or probes for specifically detecting at least a portion of the polynucleotide(s). The kit may comprise reagents for polynucleotide amplification—such as PCR—or reagents for probe hybridization-detection technology—such as Southern Blots, Northern Blots, in-situ hybridization, or microarray. The kit may comprise reagents for antibody binding-detection technology such as Western Blots, ELISAs, SELDI mass spectrometry or test strips. The kit may comprise reagents for DNA sequencing. The kit may comprise reagents and instructions for determining at least the proteasae content. Suitably, the kit comprises reagents and instructions for determining at least protease content in plant material, cured plant material or cured leaves.

[0212] In some embodiments, a kit may comprise instructions for one or more of the methods described. The kits described may be useful for genetic identity determination, phylogenetic studies, genotyping, haplotyping, pedigree analysis or plant breeding particularly with co-dominant scoring.

[0213] The present invention also provides a method of genotyping a plant, a plant cell or plant material comprising a polynucleotide as described herein. Genotyping provides a means of distinguishing homologs of a chromosome pair and can be used to differentiate segregants in a plant population. Molecular marker methods can be used for phylogenetic studies, characterizing genetic relationships among crop varieties, identifying crosses or somatic hybrids, localizing chromosomal segments affecting monogenic traits, map based cloning, and the study of quantitative inheritance. The specific method of genotyping may employ any number of molecular marker analytic techniques including amplification fragment length polymorphisms (AFLPs). AFLPs are the product of allelic differences between amplification fragments caused by nucleotide sequence variability. Thus, the present invention further provides a means to follow segregation of one or more genes or nucleic acids as well as chromosomal sequences genetically linked to these genes or nucleic acids using such techniques as AFLP analysis.

[0214] In one embodiment, there is also provided cured plant material from the mutant, transgenic and non-naturally occurring plants described herein. For example, processes of curing tobacco leaves are known by those having skills in the field and include without limitation air-curing, fire-curing, flue-curing and sun-curing.

[0215] In another embodiment, there is described tobacco products including tobacco products comprising plant material—such as leaves, suitably cured plant material—such as cured leaves—from the mutant, transgenic and non-naturally occurring plants described herein or which are produced by the methods described herein. The tobacco products described herein may further comprise unmodified tobacco.

[0216] In another embodiment, there is described tobacco products comprising plant material, preferably leaves—such as cured leaves, from the mutant, transgenic and non-naturally occurring plants described herein. For example, the plant material may be added to the inside or outside of the tobacco product and so upon burning a desirable aroma is released.

[0217] The tobacco product according to this embodiment may even be an unmodified tobacco or a modified tobacco. The tobacco product according to this embodiment may even be derived from a mutant, transgenic or non-naturally occurring plant which has modifications in one or more genes other than the genes disclosed herein.

[0218] The invention is further described in the Examples below, which are provided to describe the invention in further detail. These examples, which set forth a preferred mode presently contemplated for carrying out the invention, are intended to illustrate and not to limit the invention.

### EXAMPLES

[0219] The following examples are provided as an illustration and not as a limitation. Unless otherwise indicated, the present invention employs conventional techniques and methods of molecular biology, plant biology, bioinformatics, and plant breeding.

### Example 1

[0220] A 48 h time-point following the curing start was selected to screen for curing-activated genes based on Affymetrix data essentially as described by Martin et al. (2012) BMC Genomics, 13:674).

[0221] In brief, exon candidates from genomic DNA and from EST contigs were joined and the genomic candidates were cleaned for redundancies (98% threshold). This resulted in a set of 312,053 exon candidates, 12,925 of which were represented by ESTs, but were not included in the genome assembly. Data sets were verified as described by the manufacturer (Affymetrix). In addition, quality checks included probe-level models, Normalized Unscaled Standard Error (NUSE) and Relative Log Expression (RLE) plots, and the analysis of DABG results as described by the manufacturer.

[0222] As the exon array design had no mismatch probes, summarization was performed using Robust Multi-array Average (RMA) method. A total of 272,342 probeset expression values were generated, and DABG P-values were computed to assess the significance of the signal obtained for each probeset. This involved the background probes that are spread over the chip. These random probes have a varying GC content. Quality checks involved a combination of Affymetrix Power Tools (APT) and Bioconductor packages, for which the Tobacco Exon Array (TobArray520623F) cdf environment was created. Once the expression values were available, differential gene expression analysis was performed using moderated t-statistics in linear model LIMMA.

### Example 2

[0223] Differential expression. The tissue samples were sequenced using RNA-seq; reads were mapped to the genomes of the 3 varieties using Tophat2. Previously published gene models were used as the basis for the differential gene expression analysis. Expression changes during curing were calculated using the Cuffdiff2 software based on the mapped reads. Genes were considered up-regulated if their expression levels increased significantly during the first 48 h of curing, and not if the change was insignificant or decreased. Tobacco proteins were identified by a BLAST search against a database of transcripts for the 3 varieties and equivalent genes in the 3 varieties were identified by a mutual best BLAST hit search of the transcripts of the 3 varieties Burley, Virginia and Oriental (e-value cutoff 1e-80).

[0224] The data (FIG. 2) shows the number of senescence-activated genes in the 3 cured varieties.

### Example 3

[0225] The proteasae genes identified in Example 2 were analysed for membership of known protease families. The results are set forth in table 1.

[0226] The 80 curing-activated protease genes were found to belong to 21 different protease families.

[0227] In the table, AC, air-cured; FC, flue-cured; SC, sun-cured. AC+FC+SC, up-regulated in all three types of tobacco; AC+FC, up-regulated in air-cured and flue-cured tobacco; AC+SC, up-regulated in air-cured and sun-cured tobacco; FC+SC, up-regulated in flue-cured and sun-cured tobacco; AC, FC and SC, up-regulated only in the respective tobacco type.

TABLE 1

| Protease coding genes | AC + FC + SC | AC + FC | AC + SC | FC + SC | AC | FC | SC |
|---|---|---|---|---|---|---|---|
| Alpha/beta-Hydrolases | — | — | — | — | 1 | — | — |
| superfamily protein | | | | | | | |
| Aspartic proteinase A1 | 2 | 1 | — | — | 2 | 1* | — |
| (APA1) | | | | | | | |
| CLP protease/crotonase | 1 | — | — | — | 1 | — | — |
| family protein | | | | | | | |
| Cysteine proteinases | 3 | 2 | 3 | 1 | 2 | 1 | 2 |
| superfamily protein | | | | | | | |
| DegP protease 3 | — | — | — | — | — | 1 | — |
| Eukaryotic aspartyl | 4 | 1 | 1 | 1 | 3 | 2 | 2 |
| protease family protein | | | | | | | |
| FTSH protease 8 | — | — | — | — | — | — | 1 |
| Gamma-glutamyl | — | 1 | — | — | — | — | — |
| transpeptidase 4 | | | | | | | |
| Heat shock protein 101 | 1 | 1 | — | — | 1 | 1 | — |
| Ion protease 1 & 3 | — | — | — | — | — | 3 | — |
| Metallopeptidase M24 | — | — | — | — | — | 1 | — |
| family protein | | | | | | | |
| Papain family cysteine | 1 | — | — | — | — | — | — |
| protease | | | | | | | |
| Peptidase M20/M25/M40 | — | 1 | — | — | — | — | 1 |
| family protein | | | | | | | |
| Protease-related | — | — | — | — | 1 | 2 | — |
| SAG 12 | — | 1 | — | — | — | — | — |
| Serine carboxypeptidase- | 1 | 1 | 1 | — | 1 | 1 | 1 |
| like | | | | | | | |
| SERPIN | — | 1 | 1 | — | — | 1 | — |
| Signal peptide peptidase | — | — | — | — | 1 | — | — |
| SITE-1 protease | — | 1 | | — | — | — | — |
| Subtilisin-like ser | 3 | 1 | | — | 1 | 3 | — |
| endopeptidase fam prot. | | | | | | | |
| Ubiquitin-specific | — | — | — | 1 | 3 | 2 | — |
| proteases | | | | | | | |
| Total | 16 | 12 | 6 | 3 | 17 | 19 | 7 |

### Example 4

[0228] APA1 is encoded by a single gene in Arabidopsis thaliana and 4 in Tomato. The APA1 gene activated in flue-cured Virginia tobacco (see Table 1) is close to APA1-Tomato-1. Two gene copies from both ancestors N. sylvestris (S) and N. tomentosiformis (T) exist in N. tabacum. Affymetrix data confirmed the activation of the S form (upper panel) and apparently not the T form during Virginia flue-curing (lower panel).

### Example 5

[0229] Table 2 illustrates the differential up-regulation of SEQ ID NO:1 to 80 in the three tobacco types air-cured Burley (AC), flue-cured Virginia (FC) and sun-cured Oriental (SC).

TABLE 2

| SEQ | | | | | | | |
|---|---|---|---|---|---|---|---|
| ID NO: | AC | FC | SC | AC-FC | AC-SC | FC-SC | AC-FC-SC |
| 1 | | | | | | | x |
| 2 | | | | | | | x |
| 3 | | | | | | | x |
| 4 | | | | | | | x |
| 5 | | | | | | | x |
| 6 | | | | | | | x |
| 7 | | | | | | | x |
| 8 | | | | | | | x |
| 9 | | | | | | | x |
| 10 | | | | | | | x |
| 11 | | | | | | | x |
| 12 | | | | | | | x |
| 13 | | | | | | | x |
| 14 | | | | | | | x |
| 15 | | | | | | | x |
| 16 | | | | | | | x |
| 17 | | | | | x | | |
| 18 | | | | | x | | |
| 19 | | | | | x | | |
| 20 | | | | | x | | |
| 21 | | | | | x | | |
| 22 | | | | | x | | |
| 23 | | | x | | | | |
| 24 | | | x | | | | |
| 25 | | | x | | | | |
| 26 | | | x | | | | |
| 27 | | | x | | | | |
| 28 | | | x | | | | |
| 29 | | | x | | | | |
| 30 | | | | x | | | |
| 31 | | | | x | | | |
| 32 | | | | x | | | |
| 33 | | | | x | | | |
| 34 | | | | x | | | |
| 35 | | | | x | | | |
| 36 | | | | x | | | |
| 37 | | | | x | | | |
| 38 | | | | x | | | |
| 39 | | | | x | | | |
| 40 | | | | x | | | |
| 41 | | | | x | | | |
| 42 | | | | | | x | |
| 43 | | | | | | x | |
| 44 | | | | | | x | |
| 45 | x | | | | | | |
| 46 | x | | | | | | |
| 47 | x | | | | | | |
| 48 | x | | | | | | |
| 49 | x | | | | | | |
| 50 | x | | | | | | |
| 51 | x | | | | | | |
| 52 | x | | | | | | |
| 53 | x | | | | | | |
| 54 | x | | | | | | |
| 55 | x | | | | | | |
| 56 | x | | | | | | |
| 57 | x | | | | | | |
| 58 | x | | | | | | |
| 59 | x | | | | | | |
| 60 | x | | | | | | |
| 61 | x | | | | | | |
| 62 | | x | | | | | |
| 63 | | x | | | | | |
| 64 | | x | | | | | |
| 65 | | x | | | | | |
| 66 | | x | | | | | |
| 67 | | x | | | | | |
| 68 | | x | | | | | |
| 69 | | x | | | | | |
| 70 | | x | | | | | |
| 71 | | x | | | | | |
| 72 | | x | | | | | |
| 73 | | x | | | | | |
| 74 | | x | | | | | |
| 75 | | x | | | | | |
| 76 | | x | | | | | |
| 77 | | x | | | | | |
| 78 | | x | | | | | |
| 79 | | x | | | | | |
| 80 | | x | | | | | |

SEQUENCELISTING

SEQ ID NO: 1
ATGGCTCTTCGTTTCTCTTTAATTTTCCTATTTTCTCTTTTCTTAACGACGTCGTTATTGTT
GTCCGTTAACGGCAACATTAACGGCGGTGAAGATGACGATATTTTGATCCGTCAAGTCG
TAGGCGACGACGACGATCACTTGTTAAACGCCGATCATCACTTCACGATTTTTAAGAGG
AGGTTCGGCAAAACCTACGCGTCCGATGAGGAGCATCATTACAGATTCTCGGTGTTCAA
GGCTAACTTGCGCCGTGCAATGCGCCACCAGAAGCTTGATCCCTCCGCCGTTCACGGT
GTGACTCAGTTTTCCGATTTGACTCCGGCCGAGTTCCGCCGGAATTTTCTAGGAGTTAA
CCGTCGGCTCCGGCTTCCTTCTGATGCCAATAAAGCTCCTATTCTTCCTACTGAGGATC
TCCCTTCAGGTTTCGATTGGAGAGATCACGGTGCCGTCACGTCAGTAAAGAATCAGGTA
CTAGTATATATCAATGTTTGTGTAAAGTTTATCTTTTTTTGGATAGGCGAAGTGTTCGTCA
TTAATGAATAATTACATAATTTCTATTTGTATCGATTGAAAAACTAGGGTTCATGTGGCTC
GTGCTGGTCATTTAGTACCACTGGTGCGTTAGAAGGTGCCACCTATCTTTCTACAGGGA
AGCTTGTAAGCCTCAGCGAGCAACAACTTGTGGACTGTGATCACGAGGTTTGACGTTCT
TCCTCTTTATCTTAGCTTAAAATCATGAATATATTGTCAATAGAGTTACTGTTTTTCTTTTT
TCTTTTTTTCTGGGACGTTTGAATGTGTAAAATAATTTTCGCTGTGGTGTGTCACAGGAT
TTGGTCCATAGCTGTCATCTTTTTCTAGTTAAAGAAAATTGATAGCGTGAAGGACACTAA
CCGCATAAATTAAAGTGCTTTCTCTGATTCCGTCTCACTTTAAAGTTTAAGAACCCGTTT
GGCCATGAAATTTCTTTTTTTTTTCCGTAAAATTTAACTTTTCTTCTAAATCAATGTTTGGC
CATCAAATTTTTTATTTTCACTTGAAGATAATTTTACAATTTTTCAAAAATTTGAAAAACTT
CAAAAACTGTTTTTCAAAATTTTGAATATTGTTGTTGATGTAAAAAACAGACACTAATTTA
TAAGAGTAATCTCCTCTTCTTTGTTTGGTGGATGGCCAGGGGTGGGGACTGGGGACCC
ATCTTAAGGGAGCGGAGGAAAAGTTGTTTTATTATTAGTTTATGGCTGGTTATGAAATTC
AACTAATTGATACTCTGAGGATAACCACGGACAAAATTGTTTGGATGATGAGGAAATCG
CATCCAAAAATTGTCTGCATCTGAATATACTTTTAACATTACTTGAAGTTTCAAGTTTAAG
CTCGTGTATGCAACGTGGTGGGAGATGTACAAGGATAAATAGAAAGGCGTTGAGTTATT
GAGATAGGTTTGTAAAACTCTTCTTAAATTTTCCATTGTTTGATTGCCATTATATAATCAT
TTGTATAATTTCCAACTTGGAAAAAGCTGTTCAAACTCAAAATAAGGTTTAGGCTTGAAC
TTATTGCTATTTACGGTGTCTGCCATTTTATAATCAGAAATGGGATTGAATACAGAGTTA
ATAAGACCACTGACTCGCCTTATTTACCTCACTCGTCTCAGATGAATTTTATACTTCCAA
ATTTCAGTGTTCCCCATCTCCCTGAAAAATGTATAATTTGGCCTTGCATTTATCTGCAGT
GTGATCCAGAAGAAAAAGATTCATGTGACGCAGGGTGCAATGGTGGCCTAATGAATAG
TGCCTTTGAATACACTCTGAAAGCTGGTGGACTTATGCGAGAAGAAGATTATCCATACA
CTGGCACCGATCGTGGAACCTGCAAATTTGACAACACCAAGGTTGCTGCTAAAGTTGCT
AACTTTAGCGTTGTCTCCCTTGACGAAGAACAAATCGCTGCTAATCTTGTCAAGAATGG
TCCTCTCGCTGGTAAATAGTCTCTCAAAACACTTTTCAATTTGCCTATCATTATGCTTCTT
CTTTGTCCTTACTTGATATTGTCAAAGTATATACTTGGATTGTCATATTTATGCACTGGAA
TGTAAAAGGTATTTACACAATTAAGTCACTTATTAGGTAATTACAAGTAACTATTTTGATA
AGTTTTAATTAGTAATGTGTTAAAATGATAATTAACTTGCTATTTAAATTCACTGATAGCC
GTAACAAAATCTTTTAACTATTAATATATATAATATAAATATTTGTTTTTTAATAAACAACA
AATATTATTTGTGAAAGATCCAGTTATGTAGCTTGAAACTACATTTTGGGATTTTGAATTA
TGTACTACTCTTCTTATGCTAATGGTTTTCAATTTTTCACTGATGTAAACTTCTGAAAGCA
TTTTTGTTGCTTGGCTTGCAGTGGCGATCAATGCAGTGTTCATGCAGACATACGTTGGC
GGAGTTTCCTGCCCATATATATGCTCTAAGAAGTTGGATCATGGTGTCTTATTAGTTGGT
TATGGTACTGGCTTTTCTCCCATTAGAATGAAAGAGAAACCATACTGGATCATCAAGAAC
TCATGGGGAGAGAAATGGGGTGAAAACGGATACTACAAAATCTGTAGAGGCCGCAATG
TTTGCGGAGTGGATTCAATGGTTTCAACAGTTTCAGCTGTTAGTACCAGCTCACAC
SEQ 2
TTAAGCTGCTTCAGCAAATCCAACTCTGAGTTTGCCATAATCGAAGACTGTGTGATATC
GACCCATGAAAACATCACCCAAGATCCTGTAACCAAAGGAATACCATAGAGAACTCAGT
GAACAAAAGAACTGCAGGCTCAGGTTTAATTGTGCTGTAGCTCTATAGTTCGGATTAAA
CTTATATTTGGATTAACTGCATTGCTGATATTTATCTCTAAAACATAATTATAAACTAAAAT
AGAGAGAACATATAAAGATAACTTTACCAGAGTGGTCCGCGGGGAGGAGGAATGTCCA
AGCCAGTGAAACCACTAATACACTGTGCCTTAGCACCCTCGCCCACCTTGAGTATGTAC
TGATCACGGGAAAAGAATCCAAAATTAGAACATAGATCAATCTAGGTCAGCAATCTAAA
CAGACAACTGAAACAAGTAAAAGGGAACCACACATCGGATTACAACTTCACTCTTTCAA
TCTTGAAAAAATTTGTTGAAAGGGTGGGAAAAGACTAGAGTGATAGTCTAGTAGAGAAA
AGTTTTGCATATGGTCAAGGGGTTTGGTGTATCACTTGGATTTTTTCCTTTGTAAGATGT
GGTCTATCCTGAATTATTCAAAGCTCAACCTCTTTATGTTACTAAACCACAAAACAAACA
AATTCAGAAAAAATGCAAATGATCAAATTGATTTGGTGTACACTTGATGAATTTCTTCTTT
GTAAGATTTGTTCTATACTGAATCCTTCAGACATAAAAAAAAATATTTTTTTTTTGGGGGG
NCGGCCTGAATTAGCAAGGTCAGCAAGTAATACACTTCCATAAAAATAGCAAAGGGTAA
CTTTTTCACGGCACAAAGATCTTATGCAGGTTTTCTTAGATTACTTAGCTGGAAAATGAG
ACATCTAAATTTAAGTAAAGTCGAAATACTCACAACCTCAAAATATAGAAGTACTTCTTGA
TGACAACAAACATCTACTTCTCTGTAGAAACTGAAAACCTTAAACACTAGAATCGGTTTT
GTAATATGACAATTAGTTGTAATGCCACAAAAGGACTCTATGATGAGCCACTTAATTTTT
TCTCTCTTTGACAATGTTGAATTAGAAGAGGAATAGCAATGTTTATTACTGTCAAAGACC
ATTATAAAGCATACCTCCTTCGGGACGAGGTCAAAAACTTTGCCACCAATTGTGAAAGA
GACTGTAGGCATTGAAGAAAGCTTTCCACAGTCAACAGCTGATTCCCCCAATGGGCTTG
GGAGACGCTCGCAAAGCTGTCAGTCAGTCAGCAATCTTTTCAAGAAAAGAAGAAAATTG
CAGTGACAGATGTTTTACCTCATTCACATAGTTTAATATGCGATCTTGAGTCTGGTTTTG
TCTCAGTTGATTCTCCATCCATATGACCGCCATTTCACAAGCAGAGCACATACCATCCT
GCAGTCCTGTGGATCTGCCAGCTTTCTCGTCTACAACACTCTCAATTCCCATACTGCAG
AAAAAAGGCCACAGAATTATTCAGTATTTATATCAACATTATGGATTAACCAAATGCACT
ATATGTTCACATGAAGGGGCAAAGAGAGCCTGAAGACTAACCTAACTCCGCGGTTTCCA
TCGAAAGTGCATACTCCAACCTGTGAGCAAATCTTCTTTGGATGTGCCTGTTTAAATACT
GACCAATTAGATAACCGGGAAAGGCAACTAGATTGCCAAGTGTCATTTTGCTGTAACTG
CACAGGAAACTGCATATCAAACAAATGAAAATGCAGTTACACAGTTGAATGCTCACCTC
TGCTAACAGCAAATCCATGATTGTCTGCCCGTACTGCTCCACTACAGATTTGCATTGTT
GGCTAGCAACTCCAGAGGCTCCAATGGCTTGATTAATCATAGTGATTATGGTCTGTACG
GAAAGGGGTGGGTTTAAGATTGCTCAACCTTGGAAGTGTTTTAATCGTACAATTGTAGA
GACAAAAGGCAGCAGATTTTTACTTAATTTATATTGTCAACATTTCCAAGCCAACAGGAT
AAAACTTGGCTACAGTTTTCGGGTTGGATAATTTTCTTTTCAAATAGAAGAGGGGTAAAT
AAATAAGTCGACAGAAGACCAGGACTACAGCAGAAGTAAAAGCATCATCCTCATTGAAA
CGTAATAAAAGCAAGTAACACAAAACAACAAGTACCTACTGAGGCAGCTTTAAACATATT
AAACTGAAAGACAGGGAAGAAAAAGCAGATTTACAGACTTCGGCCCAGTGATAAGCTAA
GATGGTATATCCAAAGGTAACCTCAGAAATGAAAAACCAATTTCACTACCATCCTCTCTG
TGATGAAAAATTAAAACACAACACAGATCAGATGATGGATTCGTGCTATTTAACTCATGA
ATCTTAGGAAAATGTTACTTTTCTTGCTGAGCTGTTGAAGGTTCAAAGGAACAAGGAAAT
CAATAATCGAATTGCGGTTGACTTTGATGATGCAAACAAATAACAAAAACATAACAAACA
AGCGATATGTCCCAAATCAAGGCTATAGATAATACCGTTGGACCAGCCAAGAGAGAAGT
CCCTGAATCCGCTATTGCAGAGCACCCACTTTCACAGTAACCTACACCCGATATGTTCA
TGTTAAAAACTCAAAGGAAGGGAAAATTCTATATCCAGGCACATAGCCTTCATCTATATT
CCCGAAATTCGGCAATCCAATTCAAAAGGTACATAGCAAAACATACCAGTAGCTTTACC
CTCGATAAGAACATCACCCATATCAAACTGCCAATCATATTACTAAGATCAAGATAGCAT
TTGTACAAAAAATGAACATACATAGTATCGAATTGACCGAATGACAAACCTGCCAATAAC
CTTTGTGTGTGACTGGGACATAAGTGATTTCTCCCTTATAGTGATTAGGATCAACCCCA
CCAAACACGATTTCTCCGCCTTGTTCTTCCTCTGTATTTCGGTTGAGCCAAAATGAGAA
GACAGGATCCTTGATAAGACCCTGTTGGACCATGTTGTACCTGGAAAAGACAGGAGAT
GCTGCCCAGATGAATGTCAAATCAAATTTAAACAGAAAGAGACATCCAGCCTATCCTGC
ATTTATGGAAATCTAATCCTTCAATGTGTTAAACCTCTTCTGGAAAGGAAATTGTCTAGA
GCTTTAATTTGGTTTGTGGGAAAGAAATAGAGCAAACTAAATACCGCCCACGTACCAAA
CTGGAACAGCATTGCCAACTGAAATCTCCTGGAATCCAAGACCCAATATACCGTCAAAC
TTGGCTACCAAAAATGTCACGCTGGGTTCTCTGGTTGCCTCAATAAATTCCTAGTACAT
GAACACCTTGAGATATAAGATTTCCACTTTCAAGAGATTTAAAACAAGTGAGGAGCCTCA
CTAACCTGATCTGTTACAACAAGGTCACCAACTTTGACGTTGTCTTGACTGAAGAATCCA
GAAATAGCTCCACTACCATACTGAATTGCAGCAGACTTCCCTGTATGGCAAATCAAAAA
TTTATCACGAACTAAATCACATTAAATTACAATGCCAAATACGATCTCAGTCTTGTGGAA
ACATTCGATAAGATCTTAATGTTGTTCATTAAGGTAGGAGTGACCTAGTGTTCTTAAAAG
CAAAACGTGCAAAAAAATAAAACAAGGTCCACGGACTTGCATTGAATTGCGAGAAGTGA
AGCGCAAAATTAACAGGAAACAAGAAAATATCGAACATTTATGAATTTACTCTACCATAA
AAATTAAACTGCAGGTTAAATAACTAATTTCGGCATCCAATATACAATAATCCCAGTATTA
ATTCAACTCCTCAAAATTGAGATTCAAAGAAGCAACCAATTCTAGTTGGAATCACTTTGT
GCACCATTATTTGAAGCGCAACTTCTCTAAAGCGCATGGCTTCAGCAATGAAGTGATAG
CCCTTGCTGCATCGCTTCATAACTTTAAACGACCAAGCAATGGCTTTCAATAACACTGG
AGTGAACTCACCTGGCAAACCCATTCAACTGCTATAGACTGTTCAATCCATTTTCTTTGA
GCAACATATATAATTGTAATAGAACAAAAAATAAAGAATAACTAGTTCTCTGCGGAAAAT
TTCTTATGTCACAGACCTACATGGATACAAACCGAGTTAATAGGGAAGAAGAAAGACCA
TCTAAAAAGGCATTGCATAGGTTAAGACTTAAGACTATACAAGGTGCAACGAAAAGGCA
CTAATCGCAGAGAGATATAAGGATATTGATGTTTCTTTTCCAAAACCTCACTAGTTACAG
TAATATACTAAGAAACACAACATAAACATTAAACAGCCTCGTTTTATGTCTTAACAGTCAA
CTACATGTACTCGTCAATTAACCTTTCCAAGGGAATCCCTTGATGCACCGTGAGAAACA
CATAAGGACAATACAAAAGATGTTCCATAATGAACAAGATGGCACGTATTCTAAACAATA
ACAGGCATTAGAAGGAAGCATATGTTTCATGCAGCAATAAACAAGCAAATGGTAGAGAG
AAACAATTTGCATCAACATACAGAAATGGAAACATAACATACCATTCTTCTTATAAGTACT
TGATTCGCTTGATTTGAACTTGGAATGAAAGAAACAGGGAACCTACACCAAGATAGGCA
GTCATCAAATTTTACATCACTCAAGATGGATGTACAATGCTATGCTTTGTATCATTTGCAT
GTATAGAAGCTTACAGAGAAATAGCACTTCGACGACGGCACCCACAAATTCGAGCTACC
AGTGTCAAAGATTACAGTGAACTTCTGAGGTGGAGTGCCTACACCAATCTCCCCAAAAT
ATTGAGCATCCATATAGTTCTTCAGTGCTACAATGTCTGTATCCTCAGAGTCCCCGAGTT
TACCACGGAAGTTATACTTCCTAATAGACGCCCTCAAAACGTCCCCTTCCTTTGACTCAA
TGCGTGCAGCAAGCCGGTTATTTTGATCAAATTTCATTTTTTTCAAGCCAATTCTCATCA
AGCCATCATTGGATGAGGAGGCCAAAGGAAAGAGCAGTGCTGAGAGAAACAGGGCAA
CAAGAAATACTTTTGCTCCCAT
SEQ 3
ATGGGTTCTTTCCTCTGTTTCTCCGTCATTGTTGTTCTCCTTGTTCTTCAGCCATGTTTA
GCCAAGAAAGTTTACATTGTTCACATGAAAAATCACCAAATACCTTCTTCTTTTGCTACC
CATCACGATTGGTACAATGCTCAGCTCCAATCTTTGTCCTCTTCTTCTACCTCTGATGAA
TCATCCCTTCTTTACTCTTACGACACTGCTTATTCTGGCTTTGCTGCTTCTCTTGACCCA
CATGAAGCTGAACTACTCCGTCAATCTGATGATGTTGTTGGAGTTTACGAGGATACTGT
TTATACACTCCATACAACAAGGACTCCTGAGTTTCTGGGGTTGAATAATGAGCTCGGCC
TTTGGGCTGGTCACAGTCCACAGGAACTCAACAACGCTGCTCAGGATGTTGTTATCGG
AGTTCTTGACACCGGCGTTTGGCCGGAGTCGAAGAGCTATAACGATTTCGGTATGCCC
GATGTGCCGTCGAGGTGGAAGGGTGAATGTGAATCGGGTTCCGATTTCGATCCGAAAG
TACATTGCAACAAAAAGCTGATAGGTGCTCGTTTTTTCTCCAAAGGTTATCAAATGTCGG
CCTCTGGCTCGTTCACGAACCAACCTAGACAGCCGGAGTCACCTCGTGACCAAGACGG
TCATGGCACCCACACATCCAGCACCGCCGCTGGTGCACCTGTGGCGAACGCTAGCCTT
CTCGGGTACGCTAGTGGGGTCGCGCGTGGTATGGCACCTCGAGCGCGTGTAGCTACG
TACAAGGTATGCTGGCCTACTGGTTGTTTTGGTTCTGATATTCTAGCTGGTATGGAACG
TGCTATTTTAGATGGAGTTGATGTACTTTCATTATCTTTGGGTGGTGGATCGGGTCCTTA
TTATCGTGATACAATTGCTATTGGTGCTTTCTCTGCTATGGAAAAAGGAATTGTTGTTTC
CTGTTCAGCTGGAAATAGCGGTCCAGCTAAAGGCTCACTTGCAAATACAGCTCCTTGGA
TCATGACCGTTGGTGCTGGTACCATAGATCGTGATTTCCCTGCATTTGCTACTTTAGGT
AACGGGAAAAAAATTACCGGAGTTTCGTTATACAGTGGAAAAGGAATGGGTAAAAAGGT
AGTTCCATTAGTTTACAGCACAGACAGTAGTGCAAGTCTTTGTTTGCCGGGTTCACTTG
ACCCGAAAATGGTCCGAGGGAAAATAGTGTTATGTGATAGAGGGACAAATGCGAGAGT
AGAAAAGGGTTTAGTAGTGAAGGAAGCTGGTGGAGTTGGGATGATATTGGCTAATACG
GCGGAGAGCGGCGAGGAATTGGTGGCGGATAGTCATTTGTTGCCGGCGGTAGCTGTA
GGTAGGAAATTGGGAGATTTTATAAGGCAGTATGTAAAGAGTGAAAAGAATCCGGCCG
CCGTGCTCAGCTTTGGTGGGACGGTGGTGAATGTGAAACCGTCGCCGGTGGTGGCTG
CGTTTAGTTCAAGAGGGCCCAATACTGTAACTCCACAGATTTTGAAGCCCGATGTTATT
GGGCCTGGAGTTAATATTTTGGCTGCTTGGTCTGAGGCTATTGGGCCCACTGGGCTTG
AAAAGGATACCAGAAGGACCAAGTTCAACATCATGTCTGGTAAGTATTACCAACAACGG
CTAGTTTCTTAATTTAATCTTTTTCATGCTTAGCTTAATTATGGCCTTAATTATATTTTTAT
TAGATCTCGCAATTATTAATACTAACCGTACACACTTAAAAAGGAAAAGAGGAACGCGTA
GAATAAAGACACCTGTGGGTGATCTGGAATTATGTACTATGCACATTCCTAAACTTTAGA
GGGGTTCACATGTGTAGCATTGATAAGTTAATCCTAAATTACATTAGTTATAATTAAATAT
TAATGCAGTTTCCAAGAAAATAGATGGACTAAAATTTAGACTTATTTGTATGATGTGACG
TGTGGAATTAAATTTAAAAACTGCCCAAGCCTATATCAAATTTATGGCTAAAATAGCAAG
AAACGTCCCTTTAATAGGCACAGAAGAAATCCAAGAGGGGCTCGCTGTAGGAGTGTTA
AGAGTTTCGATATGAACAAGGTCTAGAGAAGAATTTATTAATTAATTTCAATAATATACGC
TAATGGTATTTGAAAACAATATATTGTAATTTATCGTAACAAGTTACTAATTTCGCTTATTA
TAGACCATTATTGTGAAGTTATTTCTATAGATAAGCCAATAGCATAAAATTCATCCGTCG
GAATGTGCAAGGTGTAGTGGTAGGAGTGCTACTCATGATGTGACAAGTGCATGTCACG
GGGTTTGAATCATAATGCAAACAAAAGCCTGATATGTTAGTGAAAAATGATAGAGGGAC
GGGTTCATTATTCACACAAAAGCTTGATATTTAAGTGAAAAATGATAGGGGAACGAGTTC
ATTATCCAAAGAGTTTCGAACCTAACCTTACACCATGGCCCTTCTTGGTATAATTTACAC
TAGTTTTATGAGGCTCCTTTTTGTCTCACAAATTTGTGGATCCCAATCTTACACTTCTGG
GTCCACAAAATTGTGAGACAAAAAAGTTACCTCATACAACTAGTCTCGGTTGTGACTAGT
TGTATGAGACACAAAATAAAATTTTCCGAAAAAGTAGTATGGTCTGTCTTCCGCTATGAG
ACTAGTTGTTTGAAACACAAAATAAAATTTTCCGAAAAAGTAGTATCGTCTGTCTTCCAC
TAGTGGGTCCTGGTCCCCTTGGAATCCCAGATTATTGGTCCCTACATAACTATAAAGGT
CATAACCTTATCATGGATTTAACATCAACCCTTTGCCCCATCTGAGCACTCTGGACCTAC
CTTAATCACTTTATTGGCTGGAAATAAGTTGATGAACTTTTTGAATTTTTCTTGAAAAAAC
AACAACAAAAAACCACTTGTGATCCCACAAGTGGGTCCGGGGATTAGTGTGTTATAAAG
AGGATGTTTCGGATAGACTTTCGGCTTAGGAAAGATCAATAAAGTAGTAGAAACAAGCA
ATAACAATAGCAAAATACTGAATTTTTCTTGAAAATCCTACACAAATCTCATACTTTGAAA
ATTGTATTTTGTTACATAATTTGATCATTTTTCACTTCGAACTCTTGTAGGCACATCCATG
TCCTGTCCTCATATCAGTGGCCTAGCTGCACTGCTGAAAGCAGCACATCCTGAATGGA
GTCCAAGCGCGATCAAATCTGCACTTATGACGACTGCCTATGTTCGCGACACCACCAAC
TCTCCTCTCCGCGACGCTGAAGGTGGCCAACTCTCCACTCCTTGGGCTCATGGATCAG
GTCATGTTGATCCCCATAAGGCACTTTCCCCCGGTCTAATCTATGATATTACCCCAGAG
GACTACATCAAATTCTTATGCTCCTTGGACTATGAGTTGAACCACATACAAGCCATTGTC
AAGCGCCCGAATGTCACTTGTACTAAGAAATTTGCAGATCCTGGGCAGATTAACTACCC
TTCATTCTCAGTTTTGTTCGGGAAATCAAGGGTTGTTCGTTACACCCGTGCAGTCATCAA
TGTAGGAGCTGCAGGATCCGTCTATGAGGTGACCGTTGATGCTCCCCCGTCTGTTACT
GTAACCGTGAAGCCATCAAAACTTGTATTCAAAAGGGTAGGAGAGAGGCTGCGTTACA
CCGTTACATTCGTGTCAAAGAAGGGTGTTAACATGATGAGAAAGAGTGCATTTGGCTCC
ATTTCTTGGAATAATGCTCAAAACCAAGTTAGGAGTCCAGTTTCATATTCCTGGTCACAA
CTATTAGAC
SEQ 4
TCAAGCATCAGCACATCTTGTTGGTGCATATCCCAGTCTGGACCTTTTGGTGTCATATAA
GATATGAAAATTCTGCTGCTGATAGTTTCCAATTATCGACAAAGCAGATCGAGGAGTCC
CTAAAACTGCCAAACAAACGATATCCTCTGGTTCGAGTTTGATAAAGTAGTTCTCTACTG
GAAAATTCCATACAGCTCCATCACCAAACACGATCCCAAACGAGGGAAATTCCAAGTTC
TTCACACCAGACACATTGTAACACGGATTCAAAATAGGAAAGTCTTGTACAATGGGATAT
CCCTTAACCTTATTGACAAATGCCTCTTTTATAATCTCATAAGCAGGATCCGCGAAATAA
CTCAATGTGGTACCTGAATCAATGATTGCACCACCAAGACCTTCTAGCGATAAATTCCA
CGTCTCCTCGGGTATATTCAGTACCTCTCCTCCAACTATGACAGACTTTATCTGCACATA
GTAGAATGTTTCCACTTCTTTGCCTCCAACCAATGAAGTAAAATTCAACTGTGGATGTTT
CAAAAGTTCCTTATCTTCACCAAAAATCAACTTACTACTAACACTAGAATTGCTATTCCTA
TCAACAAGACAATACGAAAACGAATGACCATATAAAGATTGAAGCTGAGAAGCAAACGA
AAGCGGCCCTCTCCCTAATCCTAACAAACCAGCAGCACCATGAAATAATCCTCTATTCC
AATGACCACAACCAAACATCACATTTTCCACCTTCCTAAATTCACTCCCACTCGTCGTCG
TGAGGTTAACAGTAAATGTCTCTAGCGCGAAATCGCCAGTAGTATTAGAACTATCACCA
TACCAATAGTAATAAGGACAAGTTTGATTCTCGGATTTACAAAGCTGAGGAGGATCAGG
GGATGTAACAAATTTACACCTAGGATCATGACAACTTATATTTCTAAATGAAGTAGAGTC
TTGAGGATTATAATGAGGTCCATTTTGTTCAAAACAATCAAAACAAGGAACACATTGAAT
CCAATTAAGATCACTACCAGTATCAAGAATTAAAGAAAAATGCTTAGGTGGTGTACCAAC
AAACACATCCATAAAATACTCACCAGAGCCAAGGCTTACACCTGACTCCAAAGTCGCCA
TTAGTTTGCCGGAAAGTTCATAAGATTCCAGCGAAACTGCTGCCGGAGCAATCACAGG
CTTATGTTTGTCCACATGTTTTTCATTACTTTTTGCAAGTCTTGAATTGTAATTCTGATTTT
TCTTCTCAACAATTCTTGTATGGAGTGTCTGAATTCTGCTTAAATCCCTTGCTCTTGACT
CAAAGACTGAATCCTTAGCCTCAATTTTTTTACCAGCTGATCTGTGCCTTAACTGAAACT
TTACAGCTTCTTTTTTCTGGTTTCCAAAAATGGAAACTTCTTCATTTTCTCCATTTTTTACA
TCAACACCATCTACTTCTTGAGCTATTGAATGGGTTTTTGATTTTTGAGAAACTCCATAG
TTGCAATCTGAGTCAGCTGAAGAAGAAACAGCATTAAAGCTTGGATGGTTAGGGAATTC
AATACCCGAAACACTAGAATTTAGATTTCTGAAGCTGTAAAATCCTCCACAGGCAACAAA
ACCAGAGGAAAACAAGAATATAAACAACAAAATGAAAAGAATGAACTTTGTCCCCAT
SEQ 5
TTACATTGAGGCATCAAGGAAAGCATTAGAGACATCATCTAATTCCACATTCAGATTTTT
GGCTGAAGGCAATCCAGCCACCACATTATGTTCAATGCCACATTCATTTGTTCCTCTTCT
GATCTTGAAGTAACCATCCTGTTATCATAGAGATAGACATACATTTAGACAAGAAGCTTA
TACAAATAGAGTTTAACTTTTGTGTATTGATAGTTTTCAGTTTGTTTAATCATTCAGGCTA
AGATGACTTATGCAACTGTCTAAAGTAATTCTAATTTAGTAACTTTAAGAGTGCAGTAAAT
AACTTGCTTTAACTTTTAAGATACACAGATAGTGTAAAAATTATTTACGCTGTCAGTATAG
TTAGCGCATCTACAACAAGGAGTTAGGATGTCGATGGTTTAAGGAAATTTGTGCTCATA
TATGAAAGCATAAGGAGAAAATAGAGTACATACATCACCCCAGCCTCTGTTCCAAGAAT
TAGCAATAAGCTGCAGAAGATAATTAAAAAAAAAGGTGATGATTAGATTTTGATAAAATG
ATATGATTTTAGATAGAAAATAAGACACCACAACTTGAACACATCAACATACCCAATAGT
CCTCTCCCTGCTCACTGGTTCCCCATCCGATAAGCTTAACAGCATGGCCTCCCATACTT
TGCCCTGTTACATGCTTGTAAACTCCAGACTTGTAGTGAGCAAAATCCTGTGATTGACA
AAAAAGTTTTAAGTCATTGGGTTAGCGGAAAGCATTGCTAAGAAAAAGAGAAAATAACAA
TTATAATCAACGAGAACAATCAAATTCAAACAAGCATTAGTTTATACTAGAGAAACTGAG
AAACTAACAATTATAACCAGATAACTTCTCATATTGTGCTAAGCATTAAATTATCTCATTT
ACAAGTATTAATTTGCAAGTAAATCTCGGACAACATAAAATGAGAAGGTACATCGGTAGT
TAAAGTTTCTCAATTATCATAATAGTTACTATCAGGTCACTTAAAAGATCATTACATGTAT
CACATTATGGGATTGGCAGGTAATTGTTTCTATGTACACATACCACAGGACCAGCATAT
AAGTTTACCAGCTCAGACAATGTCATGTGTGAAAACTATATCAAATAATTTTAGTATCAG
AACTTAACCCTCCCCCTTATCCTCATTACCTCGTAGACGGTAAAAGAGACCTCGACTGG
TCCATTTTTGTAAATTTCTGTCATGATACTGTTGGGATCATGGTGGATCCTGTATGCATT
GACACCATAATGCTTTGATTTCCCCCATAGTAGAATCTCCTTCACACACTTCCTCTGACA
CTTTGGGGTGGGATATCCTGGTTCACAACCAGGGTGGGAACATCCCTCATTATCAAAGT
AAGGGTCACACTGCCAGAAAAAACAACTTTATTAGTGATTGATCATAAAGATCCACGGT
AGCTAATGGTTTTAGAGGAAGCTGTAATCTCTTTTGGTGAAAATAAGTCACCATTTACCT
CTTCTGTGACCACACCCCTACGGATAAAGTATCGCCATGCTGTTATTGGATATCCACCA
TCACAACCACTCCCACATAAAAAGCCACAGCATGCTAACAGATCATTTACAGACAGAGA
GATATTCTGCATTACACATTAGAAGTTTAACATCAGTGACCATAACTACAGAAATAGATT
CACATACGTTTTGTGCTAGGTGAGATGGTTTCCACATGCTTAGACCATGAAAAAGAATC
ATGAGGCTGGCACGTGAGAGCACTTGCTGAAGATATATAATTAAGTACATAAAAATGTG
TCATCTAAAGCTTTTAAATGAGGCGGTCACACAGTTCAACAAAATTTACCAAGTTATGAT
GGATACAGAAACGATCAGACAGCGATTCAACAGCACCAAAAGCCCAACAAGAACCGCA
ATGTCCCTGATCTGTGACGCAAATTTGTCCCGGTGATTGATGTGCAAAGACGGAAAGCA
TTAGGATCACTATCATAGAATTATAATTCAATAGTAGTAAGCAAGAACAAGAAGAGACTG
ACCCAGAATTCTTCCGATAGTACTACATTGAGGCCAAGCTTTTCGTGCATCAAACTCTTT
TGGTAGCTCCAAAAGTTTTGGATGAGTTAGAATAGGAATTCCCTCCAAATCACCTTCTCT
TGCGGGCTTAACTCCAAGAAGGCGCTTAAATTGCGAAACCTGTGAAAACCAAAGAAAAA
CATAATTATAAATCGACGTTTTCGGTGTATGGCTGCAAAATAAGCAACTGTTATTGATGG
TTAGAGAAAGCGCTAAGCCATATGATGATCTGACCGTGAAATTCGAGAATCGAGGGTTG
AATGCAGCTTTCCACCCAGCTTTGGCATTTTCATTAACCTCTTTAATGATTGATTCCTAC
ATGATTATCCAAAAAGCTCTCTTAGTTTTAAATTTGAAGCAACAAGGGCAATAACATCTT
CTCTAAACATGAAAAGAAGAATATACCTGAAGGATTGCAGATTCAACTTTAGCTTCAGAT
ATTGGCTGCTCTGCAACAACCTGTTTTCCATAAGAACAAAGAGATTCTACTCATCAAAAG
ACATCCTTAAAGCTTTTAGGAAACAGAGCTGCAACTCCAGGAACAAAAGCATGACACAA
TGAGTGACAAACGAAGAACTTCGGGCTCGTTTGGTACGAGGGATAAGGGATAATTAATC
TCGGGATTAAATTTGAGATGAGTTTATCCCATGTTTGATTGTAGTGTTATTTTAATAATTA
TGGGAGGGTGGGATAAACAATCGCGGGATAACTAATTTCGGGATAATTAATCCTGCGAA
CCAAACAATCCCTAAAGGTTTCACTTTAATCAAGATGAAACTCTTCCACAACTTTTATTTT
CAACATTATAATACTATTAGCCTGGAAAATTAATCAAAAGTTTGTAGGAAATTCATCATAT
GTCTAAAGCACTATAACGTAGAGGAAAAAGAATCATAGAACAAGCAGAAATTGTAATTA
GTCCATTATTTCTCCTCCTTCTTCTCCCCTTTCTGTATTTCTTTGTGAAGCAATACTTCCT
CTCATGTTATTATATTTCGACAAGTAAGTTAGCTAACACATAACATAAGTAATTTGCATCA
AACCATATAATTAACTTCAGAAACATGTGTATACTTCTCTTTTCTCATTCTCACTAGGTAA
TGAGAAAATCATTAAAATTTGCTTCTACTCATGATTTCTAGTCAACGCTTAACTAAAGCAT
AAGAAGTCCAAAATACCCAACAATATTTGATCTTTCTGAAGAAACACAAAAAGGCTAATC
CTTGTGTTCATCAAAAGCTATACAAATCAAATCAATACGCTAAATCCACCTAAAACAAAA
TCATCAATTCAATAGGCAAGAACTACCCATAAGACATACTCCTACTGTGAAAGGTTCAAA
GAATGAAGAAACAAACCTGCAATATAAGGATAAACAAAGCACCAAAAAGCAAAGGAGTT
GCTAAAGACTTCAGGGTCAAGGCCAT
SEQ 6
ACATTAGTCCTCCATACTTCTTTCTATCTTCTTCTGTCAGTCGCATCTCCCGGCGACTGT
CTCCTCCTCTCCATTTTTCCTTTCTCTTTTTCCTCACCGAGATATTTTCCCTATAAACAAA
ACACCGTAAAAATCATCTCCTCTAATTTCCTATTTTCCCCATTTTTCCAAATGGGTTCTTT
CCTCTGTTTCTCTGTCATTGTTCTTTTCCTTGTTTTTCAGCCATGTTTTTCCAAGAAAGTT
TACATTGTTCACATGAAAAACCACCAAATACCTTCTTCTTTTGCTACACACCATGATTGG
TACAATGCTCAGCTCCAATCCTTGTCCTCTTCTTCAACCTCTGACGAATCATCACTTCTT
TACTCTTACGACACTGCTTATTCTGGCTTTGCTGCTTCTCTTGACCCACATGAAGCTGAA
CTACTCCGTCAATCTGATGATGTTGTTGGAGTTTACGAGGATACTGTTTATACACTTCAT
ACAACAAGGACTCCTGAGTTTCTGGGGCTGAATAATGAGCTCGGTCTTTGGGCTGGTC
ACAGTCCGCAGGAACTCAACAACGCTGCTCAGGATGTTGTTATCGGAGTTCTCGACAC
CGGTGTTTGGCCGGAGTCGAAGAGCTTTAACGATTTCGGTATGCCCAATGTGCCGTCG
AGGTGGAAAGGTGAATGTGAATCGGGTCCTGATTTCGATCCGAAAGTACATTGCAACAA
AAAGTTAATCGGTGCTCGATTTTTCTCCAAAGGTTACCAAATGTCGGCTTCTGGTTCATT
TACGAACCAACCTAGACAGCCGGAGTCACCTCGGGACCAGGACGGTCATGGGACTCA
CACATCCAGTACCGCCGCTGGTGCACCGGTGGCGAACGCTAGCCTTCTCGGTTACGCT
AGCGGGGTCGCGCGTGGTATGGCACCGCGAGCGCGTGTAGCTACGTACAAGGTGTGC
TGGCCTACTGGTTGTTTTGGTTCTGATATTCTAGCTGGTATGGAACGTGCTATTTTAGAT
GGCGTTGATGTACTTTCTTTATCTTTGGGTGGTGGATCGGGTCCTTATTATCATGATACA
ATTGCTATTGGTGCTTTCTCTGCTATGGAAAAAGGAATTGTTGTTTCCTGTTCAGCTGGA
AATAGCGGTCCAGCCAAAGCTTCACTTGCAAATACAGCTCCTTGGATTATGACCGTTGG
TGCTGGTACCATAGATCGTGATTTCCCTGCTTTTGCTACTTTAGGTAACGGGAAAAAGA
TTACCGGAGTTTCGTTGTACAGTGGAAAAGGAATGGGTAAAAAGGTAGTTCCCTTAGTT
TACAGCACAGATAGTAGTGCAAGTCTTTGTTTGCCGGGTTCACTTGACCCGAAAATAGT
CCGTGGGAAAATAGTGTTATGTGATAGAGGGACAAATGCGAGAGTAGAAAAGGGTTTA
GTAGTGAAAGAAGCTGGTGGGGTTGGGATGATATTGGCGAACACGGCGGAGAGCGGC
GAGGAATTGGTGGCGGATAGTCATTTGTTACCGGCGGTAGCTGTAGGGAGGAAATTGG
GTGATTTTATAAGGCAGTATGTGAAGAGTGAGAAGAATCCGGCCGCCGTGCTCAGCTTT
GGTGGGACGGTGGTGAATGTGAAACCGTCGCCGGTGGTGGCTGCGTTTAGTTCAAGA
GGGCCCAATACTGTAACTCCACAGATTTTGAAGCCCGATGTTATTGGGCCTGGAGTTAA
TATTTTGGCTGCTTGGTCTGAAGCTATTGGGCCCACTGGGCTTGAAAAGGATACTAGAA
GAACTAAGTTCAACATCATGTCTGGTAAGTATTACCAACAACGGCTAGTTTTTGTCATAA
TCTTTTTATTTATGCTTAGATTAATTATGGCCTTAATTATATTTTTATTAGATCTTGCAATT
ATTAATACTAATCGTACACACTTGAAAGGAAAAAGAGGAACATGTTTAATTAGTGCGTAG
TGATCTGGAGCACATGCCTAAAGTTTAGAGGGGTTCACATGTGTTGCATTGATAAGTTA
ATCCTAAATTACATTAGTTATAATTAAATATTAATGCGCTTCCAAGAAAAAGTTGACTAAA
TTTATCATATATTTCCAAATTTGTTTTGAAAAATATGATTTTGGTGAAGTTTGGCTTGAAG
ATGAAAATGTGTTTGGACATCAATTTTCAAAACATATTTCCCAAATTTATTTTGGAAAAAC
ATGAAACATTTCTTATACCCACAAGTTTAAAAAACTATCACAAATATCCAACGGTACCATT
ATCAATAACATTCATTATATTATCTCAAACCATAATCCTGAATATAAATAAATTTGGCACA
ATATTATCATTTTTATAATTAACTATATGATACACTATTAGATGATCGAGAATACGAAGCA
ACATCGTTTCAAAATAATAAATGAAAAATGGTGGACTCTTTTATATAATACAAAAGTTTGG
AATAATTTTTAAAAAATATAATAATGATATTTTGACCCAAAACCAACATGTAGTCAAAATC
TATGACCAAACATGTGTTTGCCAAATAAAACCCAAATTTATTTTGACAAAATATATGGCC
AAACGGGGCTTAGTTGTATGATGTGTCGTGTGATATTAATAAAAGAACTGCCGAAGCCT
ATACCAAATTTATGGCTAAAATAGCAAGAAACGTCCCTTTAACAGGGACAGAAGAAATC
CAAGAGGGGGCTCGCTGGTCTAGAGAAAAATTTATTAATTAATTTCAATAATACGCTGAT
GGTGTAAAAAATATTGACACCATCAATATATTGTAATATATCGTAAAAGTTTATTAATTTC
ACTTATTATAGACAATTATTTGAAGTTATCTTTATAGCTAACCCAATAGTGTAAAATTCAT
CCGTTGGAATGTGCAATATGATGTTTGTTTTCAGCTTTTGTGCAGTAGTGATTTTAAATA
GGTATTACTTGGAGCTTTTGTGCGATGTGACAAAGTGCATGTCACAAGGTTAGAGTCAT
AATGAAGGCAAAAACATGATATTTAAGTGAAAAGTGATAGAGGGACGAGTTCATTGTCC
GCACAAAAGCCTGATATTTAAGTTAAAAAAAATAGGTGACCAGCTTGATATTTAAGTGAA
AAAGGATAGAAAGACGGGTTCATTATCCACCGAAAGTCGAACCTAACCTTTTGCCATGG
CCTTTCTTGGTCATCAAAATAATTTAGGAGACTACCTAGGAAAAGTAGTATGGTCTGTCT
TCCACTAGTGGGTCATAACCTTAATATCATCCCCCTTGCCCCGTTGAGTACTCTGGACC
TATCTTAATCACTTCATTAGCTGGAAATAAGTTGATGAACTTTTTGAATCATTCTTGAAAA
TTCACAAATTCGAACCGTGGAAACAATCTATTACAGGAATGCAGTCTAAGTCTTCGTACA
ATAGACCCTGTGGTCCGGCCCTTATAGCAGGAGCCTACTGCACTGGGCTGACCTTTTT
CTTTAAAATCTTACAGAGCTCAAAATTTGGACTTTGTACTGTTTCGTTACATTATTTGATC
CTTTTTGTACGTCAAACTCTTTCAGGCACATCCATGTCCTGTCCTCATATCAGTGGCCTA
GCTGCACTTCTGAAAGCAGCGCATCCCGAGTGGAGTCCAAGCGCGATCAAATCTGCAC
TTATGACGACTGCCTATGTTCACGACACCACCAACTCTCCTCTCCGTGACGCTGAAGGT
GGCCAACTCTCCACTCCTTTCGCTCATGGATCAGGTCATGTTGATCCCCACAAGGCACT
TTCCCCGGGTCTCATCTATGATATTACTCCAGAGGACTACATCAAATTCTTATGCTCCTT
GGACTATGAGTTGAACCACATACAAGCCATTGTCAAGCGCCCGAATGTCACTTGTGCTA
AGAAATTTGCAGATCCCGGGCAGATTAACTACCCTTCGTTCTCAGTTTTGTTTGGGAAAT
CAAGGGTTGTTCGTTACACCCGTGCAGTGACCAATGTAGCAGCTGCAGGATCCGTTTAT
GAGGTAGTCGTTGATGCTCCCCCATCCGTTCTGGTGACCGTGAAGCCATCAAAGCTTG
TGTTCAAAAGGGTAGGAGAGAGGCTGCGCTACACCGTTACATTTGTGTCCAACAAGGG
TGTTAACATGATGAGAAAGAGTGCATTTGGTTCCATTTCTTGGAATAATGCTCAAAACCA
AGTTAGGAGTCCAGTCTCATATTCCTGGTCACAACTATTAGAC
SEQ 8
ATGAATCCTGAAAAATTCACCCACAAGACTAACGAGGCCCTTGCTGGGGCACACGAGC
TAGCACTATCCGCAGGGCATGCTCAATTTACGCCTCTGCATATGGCTGTGGCCTTAATA
TCTGATCACAATGGTATTTTTCGACAAGCGATTGTCAATGCTGGTGGGAATGAAGAAGT
AGCTAATTCAGTGGAGCGGGTATTGAATCAAGCGATGAAGAAGCTACCTTCTCAGACAC
CGGCTCCAGACGAAATCCCACCTAGCACTTCCCTTATCAAGGTGTTACGACGAGCACA
ATCGTCGCAGAAGTCTTGTGGTGACAGCCATTTAGCAGTGGATCAGTTGATTTTAGGAC
TGCTAGAAGACTCTCAAATCGGAGATCTTTTGAAAGAAGCTGGGGTGAGTGCATCAAGA
GTGAAATCAGAGGTAGAGAAACTTAGAGGAAAGGAAGGAAGAAAAGTGGAAAGTGCTT
CAGGGGATACCACATTCCAAGCACTCAAGACTTATGGCCGTGATCTTGTGGAACAAGC
AGGAAAGCTTGATCCCGTGATTGGTAGGGATGAAGAAATTAGAAGAGTCGTTCGGATTT
TATCAAGGAGGACGAAGAACAACCCGGTTCTTATTGGAGAGCCTGGTGTGGGTAAAAC
AGCAGTTGTTGAAGGGCTAGCACAGAGGATTGTACGTGGTGATGTTCCAAGTAATTTAG
CTGATGTTAGGCTTATAGCATTGGATATGGGAGCGCTAGTTGCTGGAGCTAAGTACAGA
GGTGAATTTGAAGAGAGGCTGAAGGCTGTGCTGAAAGAAGTTGAAGAAGCAGAAGGGA
AAGTGATACTTTTCATTGACGAGATACATTTAGTCCTTGGTGCTGGTCGGACAGAAGGG
TCTATGGATGCTGCTAATCTGTTTAAGCCAATGCTAGCCAGAGGTCAATTACGGTGTAT
TGGTGCAACTACACTTGAAGAGTACAGGAAGTATGTTGAGAAGGATGCTGCATTCGAGA
GGCGTTTCCAGCAGGTGTATGTGGCTGAGCCTAGTGTTACTGACACTATTAGTATTCTC
CGCGGGTTGAAGGAGAGGTATGAAGGGCATCATGGTGTTAAAATTCAGGACAGAGCTC
TTGTGGTGGCTGCCCAGCTCTCATCTCGGTACATTACAGGTATCTATACTTTTGCTATTT
TTACATAGCACCTTGTTTTGATGTCTTTTCTCCGTCAATAACTAAGCATGTATATGCACTA
CTTTTTCCTCGTGCATTTCATTAACTCTATAAATCAGAATGGGACTTAGATTCGGTTAAG
CGAATGAAGGTGAATTTTAACCTAAAATGTTATGGTGTCGGAGCTATAGATGTATATTTG
TCTGGTACTAAAATGACTTCTTGAAGCAGTAGCCAGAATTTTGATTCATTTAAGCAGGTA
GGGCATGAGACTTAATTAGCATATCATTGTCTGCACTTCCTTCTGGACCTTTACCAGTGT
ATGAGTTGTTTTTGTGTTACAAGCTGCTCCCCATCTGGATAATGGTGGATTAAGACTTAT
ATGATTGTCAGAAGTGTACTAAAACTTCTTGAGGATAATTAAAAATTGCTCAAATCAAAT
CCGTAGCTCGTTTTCCACTGTCAGTTTTTGCAAAATGCTTTTTATGTCTGTGTCGTGACA
AATTAAGCAGTCAGCCAGTTAAATTTTGGCAGTTTGGCATGCAAATTGTCTTTGCTGCAC
ATTTCAGGTGCAAAAATCACTAACCTCTTTGTATTTTCAGGTCGACATCTGCCAGATAAG
GCTATTGACCTAGTTGATGAAGCTTGTGCAAATGTTAGAGTTCAGCTTGATAGTCAACCT
GAGGAAATTGACAATCTCGAAAGGAAGAGAATTCAGCTAGAAGTTGAACTTCACGCTCT
CGAGAAGGAAAAAGACAAAGCTAGCAAAGCACGTCTAGTAGAAGTAAGTATTATATACT
ACCAATGCTTTTACTGGTAATTGCTCTATTTTCTAAAAGATATGTTAAGAATTATACTGAC
TCGAATTATACTGACACTGGTCCAGGTGAGGAAAGAACTTGATGATTTGAGAGACAAAC
TCCAGCCCTTGATGATGAGGTACAAAAAAGAGAAGGAAAGGATAGATGAGCTTCGCAG
GCTCAAGCAAAAGCGCGATGAGCTCATTTATGCTTTACAAGAAGCTGAAAGGAGATATG
ATCTGGCTAGGGCAGCAGATCTGAGATATGGGGCAATTCAAGAAGTGGAAACTGCAAT
AGCAAATCTTGAGAGTACCTCAGCTGAGAGTACAATGCTAACAGAGACTGTGGGTCCT
GATCAGATTGCCGAAGTTGTGAGTCGCTGGACTGGTATTCCGGTCTCAAGGCTTGGGC
AGAATGAGAAAGAGAAACTGATTGGTCTTGGCGATAGGTTGCACCAAAGAGTGGTCGG
GCAAGATCATGCAGTTAGAGCTGTTGCTGAAGCCGTGTTAAGATCTAGAGCTGGTTTAG
GAAGGCCACAGCAACCAACTGGTTCATTCCTTTTCTTGGGGCCAACTGGTGTTGGAAA
GACGGAGCTCGCTAAAGCTCTTGCAGAGCAGCTCTTTGATGATGATAAACTGATGATCA
GAATAGACATGTCCGAGTACATGGAACAACACTCTGTTGCCCGGCTGATTGGTGCTCC
ACCAGGGTAAGTTTGAATCTAATTCTTTTCTTTTAATGTCATGTCATATTATTACAGTATT
CAATCACAGATTCTCATGTGTTCCACATCTGCAGTTATGTTGGGCACGATGAGGGAGGA
CAACTTACTGAAGCTGTTAGGAGGCGGCCTTACAGTGTTGTGCTCTTTGATGAAGTTGA
GAAAGCCCATCCTACGGTGTTTAATACATTGCTTCAAGTTTTGGATGATGGAAGGTTAA
CAGATGGTCAAGGCCGCACAGTTGATTTCACCAACACCGTGATTATTATGACTTCAAAC
TTGGGAGCAGAGTATCTGTTGTCTGGATTAATGGGAAAATGTACGATGGAGACGGCTC
GTGAAATGGTAATGCAGGAGGTAAATAGTCTCAAACTAGTAACTTCCCCTTTGCTGATA
AAACTGGAAGAATACAGTGAAATAGTTTACCTTATTAGCTAGAATGACAACTGTTTACAT
GTGTGTATGCTTTGTGATAGGTGCGAAAGCAGTTTAAGCCCGAGCTCCTGAATCGGCT
GGATGAGATTGTTGTGTTTGATCCCCTGTCCCACGAGCAGTTGAGGCAAGTATGCCGC
TACCAGATGAAAGACGTTGCACTACGGCTGGCTGAGAGGGGTATTGCATTGGGTGTTA
CTGAGGCAGCTCTAGATGTCATACTCTCAGAGAGTTATGACCCGGTAAGTGTTATATCT
TGTAATCTAGTCCAATATTTTAGGATTATTTTGCGAACTTGTACTTATTGTGGTGATCATG
GCATTCAGGTTTATGGTGCAAGACCTATTAGGAGATGGTTGGAGAGGAAGGTGGTGAC
CGAGCTATCCAAGATGCTTGTGAAGGAGGAGATTGATGAGAACTCAACGGTTTACATAG
ATGCTGGTGTCGGCAGGAAAGATCTAACCTACAGGGTGGAGAAGAATGGAGGTCTTGT
GAATGCTGCCACCGGGCAAAAATCTGATATATTGATTCAGCTTCCTAATGGTCCCAGGA
GTGATGCTGTCCAAGCAGTCAAGAAAATGAGGATTGAAGAAATTGAAGAAGACGAAATG
GAAGAT
SEQ 9
TTATGTAAATGCTTCACGTTGCTGTGTAGGTAGCTCCAGTTCAGGCTCAAATGCTGTTA
GCCGAGAAAAATACTGATCTACCATGTCATCTGTTACTTTATCCAAGCTTGGAGGATCC
CACTGCACGTTTTAACATAAATCAAGAAACTCTCTCTAAGGTTAAAGTTGACTCTTAGGA
AAATTCCTCCAGGAAGGGGCTCATAATTCATAAAAATAGCATATTAGTTCGCAATAATAT
TGATTTACCTTAGGTGCAAAATCTCTATCCACAAGCCGTGCACGAACCCCCTGATAGGA
AGATATTAGTACACTGTGATGATGATCTGTGGAATTTAGTACTGAGACTTTTTTTAGCAG
CATATATTACCTCACAGAAGTCATTAGTTATTTGTCCAGAGAAAGCTTGTACTGACATTC
GATACTCACGAATTAGACACTGGTCCAGAGTCTGATGTCTGCCTTCGCGTATCTGATCA
GAAGCATTATTGGAAGGTCATCTCACAATGCCCTGGTGGCAGAAGGGAAAAGGAGAAC
ATTCTATCTAGAGAAACTTACAGATCTCAGTGAAACCTTCAAGCTCAGTGGGGCTGTTT
CTTGTAGTTTTCGCAATGTTGAAACACACCATGCATCTTGCTTCTTGGCTGCCTCACTTT
CCTGGCAACATTTAAATTTCTTTTTAAAAATGTAATCACACCTGTCCTTAAAAACTTCCAC
ACATGTAGCAGACTTTATATGTTTACTTAAATACTTTACTGTCAGTATTTTAAAAACAAGA
GAAAATCCATCTCGCTCGAAAGAGCACCCAGAGGTCGTAGATGCAAACGCAATGACTC
AGCTTGTACTATGGTGCAACAAAGTGCAGCACTTAAAGGCTTCTCCGTGCAATTTATAC
GTGATGTTAGAATCTCCACAATATGCTTTGCCCAAAGAATGATAGATATAAGTTAGTGTG
ACAACAGCCCCAGGACCTATAGGTACTTTTTGAACCTCAAGGAGCAAACAAAGAGTATG
CTGAGCAATGATCATTGCATTGTTTCAGATTTTTCAAATAGTGGCAACTTGTGATGGCCG
AGGTATTAAAAGCAAAGCAATCCGATGCTGAACATTATTGCATTGATCAACTAAAATATG
TTTCCACTGGCACCTAAGGGGGTAGACTGTAGCCAAATAGTCAATGAAGTCGGTGAAAA
ACACGGGAGACTAGGTTTCAAATCTAGCAAAGAGTCGGAGAGAGTCAGAGACAGAAAG
GCTAGGTGATTTCTTCCTATCTGCCTAAAATTTGGTAGATAGCAAGTACCTGTTGGAATA
GTCGAGGTGCGAGCAAATTGGCCCACACCACCGTTATAGAAAAGAATAATGTTTCTACT
GGCCACACTTTGATTGTATGCCCATCCGATCGAGTTTCTTACCAGGTAATAGCCTTCAC
ACCCCAGGCTAGTGAATTAAGATGTGCTATCCTATAAAGACTTACTTCGTCCTCCACTAA
TATGATCGTATCTTGTTACTGGAGTCGAAGATGGTATGTTGGCGAGGCTTCCACCTTCT
GAATACCACATGTTTAATCCCTGTTCTTTCTTTTCTCACTAGAGATATTAAGCAAATTAAA
ATCAATTAACATCAGAATTTTGTATCTTTCAGAGACCTTTTCAGTATATTTGGGAAACAAG
TTACACACTCAGGAACTATATGCTCACCAAAGCATCAATAATTTCTTCGACTGTGTCATG
GCTGAAACATTTATTGAGAGTTTCAATCCTAAAGAAAGAGAAAAGATGGATTAGATTAAG
CTATCAAATACTCATTGATCTGCAAGCAAGATCACACAAACTTGATAAGAATTTATTTTTA
TAAAAACAAAAGGTTAAAGAACAAGACTAAATACAAAAACCAAAAGATCCATGTGAAACT
ATGACAAAAATTATCATGAACCACAAAGTTTTAAGAATGTAGTGTGAAGTTTTAGAGAGC
TGAAGTTTGTTCCACTAGTTGATGTATTTTATATAACTCATGGAAAAGATGGTGCCACTA
CCAGTTTCTCTATAATGGAAAAAACAATTTCGCCACTTACAAATCTAAGTGAAGCTAAAT
ATGAAGAGCTAATTGCAGGATTTTGTGTTTACTGAATTAAACAATTTACCAAAAATTACCA
ATTTGATTCCTCGAAGAAGAAAGTAAGAGATTGATTTGCAATTCTTTCTTTTTGAGTAGTA
TGAAAAATGTTATGAAATGAGGGCAAGTGTCTCATCCAATTAAACCTGTAACTTGCTTTC
CAACAGCAGGTAAAATATTGAAGCAAGGCTGCAGCGTGTCCACTTATGATTTCAATTAG
CCAAGGGATTCTTTCGATGTTCTATAAGAAACGTGAACGGGATTCCCCGAAGATGTAGG
TAGGGAATCCGCTGACTGGTGTGGTATATATGTTTGGTTAACAACTAGAAAAGGTGTTT
CAAATCCAAAAGCAGCCCTTAACATTAAACGGTAATATGTATCAGTCCACCCCCTTTCAA
ACTGTAGCAGGAACTAATATATTTATGGACATTCCAATTTCCATATTTAGCAAGGATGAC
AGGTACCTGTGAAGTACACTTGTTGGATCTGGATGGACAATCTCTCCACAATTTTCAAG
AGATCTTTCAATCACTGAAGGATCATCAGTCATCAATTTACCAAGTTGTTCCTCAATTAA
GGGAAGCTTCTGAGAGGAGTGGAGAAGGCAGAGAAGAAGTTTTCAGAGCAATAGTCAA
ATAACCTAAGTAGGCTATTGGTACCTAGGTGCAAAGCAAATTAAGCAAAGGTAGTAGAC
TTACTGCACTGTGTAAGTAGTGAGTAGCAAGCCCACAGGATATCATTTCTGCTCCATTG
ATCTTGTCTCCAGTTAGGGCCAGGTACTCTCCTGCAAATTGAAAACATTTAAATAGCTTT
CTTCCATGCTGATTTTTTCTTTCATTTACGCAGTAGCAAATGTCCAAACAGATGAGAGAC
ACAGAGAGAGGCAGCATACTAAAAACATATTCCACTTGAACCACAAACTAGTATAGCAT
AAGATAGATAGGGTTTACATGAGCTGACATGCGTGCATCAGGTTGCTTAACATTTATAT
GCCATAGAATATGAAGTCATCAAAGAGTCAGCCATGTAAATGCAGTGCTACATGATCTA
GCATGAGTTATCAGTTATCTACAAAAAAAAGGCTTGTAACCCACTAATTTTAGTCCGCCA
CCATTTAAAGCTAAATATTAAATAGATAGAACCACATATTAACATCACCGTATGAAGTTAA
ATTTTTAAAAAAAAAGGCAGTCCAGACAAATTCCGAACATAGGTAGAATTCAAAGTCATA
ATCTCCAAAATACATGAAACAGGAGGAGGAACACATGCTTACTTCCCAATGAGTTAGGG
AAAAATAAGATGAAGTAAAAAGAACATCACGTTAGTACAAATATTTTGATAACAAGCATA
TAAGAAGGGAAACGTCCAGATATGACATGCTTATTTTTTCCCCATAGAAGATGCGCATC
TCCCCAGAGAAGAGGAGATCGGGGAAGGGGGTGTGTGTGTGTGTGTGTAGAGAGAGA
GAGAGAGAGAGGGGGCGCGGGGATCAGAAAAGTAGTTTCCAACTAGATAATTCATCAT
CAAAGACGATCAGCTACATGACATGATAGAAGTTACTGATGGATCCAAACCACAGCATG
AGATCAGCAAAAGAATATACCCAAATAACCAGGGAGGTGTGAAAGGTAAAATGACGCC
CCAGCATCGGGATGGTAACCAATCAATGTTTCTGGTGTGGCAAAAACCTACATTGATAC
AAGACCCAATACCCTTGTAAGAACGGTGAAAAATCGATCTAACAGCACTTAAAACACCT
AAACCATCACCTCGTGCACCGGCCAAATTTGATAGACCTCTTTGACAATTAAGTTCGATA
AATTTTTTATTTCCTGCACATTCCTTTAGTTCTTGAGTAATTTAAAATCAGGTTATAGCATT
TCAGTAAGACCAAGATATCTTAAATTTTTCAGCACTTTAAACGCTAAGCCTGTGGTTATA
AGTCATATATAACCGAAATAAACAAGCTTCATCACGAAAAGTCAAAAGAATTGATAATAT
ACAATTGAAATTACTATTTAACTTATTGGTACAAAGAAACTTCATCAATATAGAGCATTCA
ATTTAAGAAGATTAAAAGATGAATTTTATCAAATTAACTCGGTACGAACTCATAAATAGAT
AATAATAACTGATAAGGCCAAAACTATCAATAAAGGAAAAGCAAGAGAAGGGGCAGAGG
AAAAATTTGCTGAATAAGTTTGTAGCACTAGGATTTGAACTTCTCTCTGAAGAGAAATAA
TTAAGATTTAAAGAACAGAAAATTCATGATATGTGAAGTCACTAAGCTGTATATAAGAAT
GAGCACAAATGGAACTTCACATTACTTAGCAATGTAGTCTAGCAGTTCTTGAAGTAGGA
GAATTTATTCTGAACCAACAAATGAAAAGCTTAAACAAATAAAGCATGACTAATCTTTTCC
ATACAGTTTTCTCAGTTGCAACACGGAAAGTTCCAGGAATTGAGATGCCAGCCCCACCA
CCCATGGTAATTCCATTCAAAAGAGCAACCTGCATATGGCATCTGAGGATTAATATCTAT
ACTTGGGAACCGCATCCAGGGACCAGCTAATGTCAACAAAAGTATGACAAGTACTGAAT
ATGCAATGACTGAATTCCTTCAACATGGAATTGAGGAGGTGAGAGCGAGAAGTAACTCA
AATCCGAAAGTGCGCAAAAAGCTCTAATCGATAAAAAGATACAAAGAAATATGGATGAT
AACTACTGATAAATGCACACCGGGTTTCTGAACTAAAAAAAGACGTATATTATGATTAAT
AAAAGAATGAAAAGACCATTATGGCTGCATCTTGTCAAAGCAAAAATGATCACATGATTT
TAACAAAATAAACAACTTCCAAAATTGAGGAGATATTATTTCATGGGCAAAAAGGAACAG
ACAAACTATAGGTCTAAACAGGTGACCACTTTGTTGAGCATCAACAACAGCTTATCCCA
AATCTTTCATTTCAGAAGTCAAAGAACACAGCAGCAAGAGAACTATGGATGAACTAAGA
AAATGGAGTTGAATATCTATGAATAATTGGATCAAATTTGCATTTGTCCTAAGGAAGTTC
TTTAAGCTTATGAATCATAATGTTAATGTGACTGATTATGTTTTCCTCAACAGGCATCGTT
ATGAAGATTGTATAGCAGCCAGCATGATAAAGTAGTGTTGCTACCATTTCAAGTTTATGA
ATAAGATCCAATCAAACTTTGGCAAGACACATCTAACCTCTCTGAATACCATTTTAATTC
AGAAAGAAGTGATTGGTGTAATTAACTGTCGAGATGCTGTCTTTGCAGCAGCTTAGTCA
CAGTAAGATGAGAGAGAATCCAATTAACAGAACAAGCGATCTTCTAATAAATCCAGATAT
TTCTATAAGAGTATCTTTAAAACTGCCAGCATAAAGTACAAAGGTGTTGAAATTTCAATA
AGCAATGGCGAATATAGGATGAAAATGTTGATTCAACATCTAATAGAACTTACATATATT
TTTTAGAAATTCTTAGGTTCCAACTACAGAAGCATATTTTATTATGCGGAAGTCTAGACG
CACAGTTAGATCACAACATAAAAGACATGTAACTACAAAATTTATAAGACGCTGGCCTCT
ATCAAGGTTTAGTAAATACAACAAAAGTTCCTGATACATATATAAGAGGCAGAAAACAGA
AGAAAATTCAAGTCAACAGTTCTTTTAGTATCTGATGTTTGAACAATAATGATACTTACAT
GTGGCTTCAAGAGTGTGCCGACAACGTATACTAAGTTATTTATTGTCCAACAAAAATCTT
TACAGTCTTGAAGATTCCCTGCATCTATCCAATACAAAAAATATTACACAAAGAATGGAG
AAGATCAAATTAAAATTGAGGTAATAGTAAATTGGTAGCATGAAGATGCCGGCTGCAGT
TTTTAAAACGATGTAGAAACGTTTTAATTGTTCCCAAAAATAAATAGATATCAATACCCTA
CTCAATAAAAACAACAGAACATCCAGCTATCAGCACAAATAGCTTAATTAAGATAATTCA
CATCTAAACAACTTCTTCACACCCCAATAATACAATTATCGACAATGTTTAAATATTTAAA
ATTCCTTTAACCATGTATCACTTGCAACATAGCAGAATATGAACAAGTTCGCCGTGAAGT
ACAACAGTCAAAATGACACAACATACCTTGTTTTAACAAATTATAAATAGTGACAATGTC
ACCCCCAGCAGAAAATGCCTTGCCACTTCCCTTCAAAGTTAAAGAATAACTGAGTTGCT
ACTCAGTAGATTAACATATGTAACTTCACCTTAAGATAATCCAGAAGAACAACAATAGGA
AAAGCCATAAAATAATTCAAACAATAATTTACTTAACAAATTACCTTCAATACCACGAATC
CAATATCAGGATCATCTTCCCAATTTTTGTACAGCTTTAGCAACCTATCCACCTAAACAA
CAGTATCATGCAGAGTTTTTATTTATTATACAAGGTGGAAATTAAGATTGCCAACCAACT
GGAATATCAAGATTCCCCAGTGTCATGTAGGGTTCATTCCCAAAGCCAAAACAAAATCA
ATTCAGCATAAAAACACGATTTTGATGGTTGGATATTAATTAAAACACGATTTTACTTGGT
GGGTATCAATAAAAAAAATCCAAAAAGAGAGCAATAGATTTCAAAAATGATCTTCTTGTG
CGTACACACTGTAGATTTCAAAAATGGCAAAAACAGAAGCAAAAAGTAAAGGTCTTTAAA
AGGCAGGAAACTAACAACTGAAAAATTGAGAGCATTTAACGCATGGGGTCTGTTAAGGA
TTGCTGTTCTCGAAGAAGCTTTTCCCTCCACTAACACCTGAAAAATGCAAACTCATATTT
TATAACAAAATGGAAATTTTGATAATGAATCATAAATTGGATTGACAAATTTTCTTTTAAA
AAAAATTCAGAACTCACAGTGCTTTGGGATTCATCAACAAGGGCATTGGTAGAGACACT
GCAAAAGCTTCTGGAGTGAGAAACCAAGCGCGAATTCTGCAGTAAGCGCCTCAAAATA
CTTGCTGATTTGAAGCTCTGCAT
SEQ 10
ATGGCCTTGACTCTGAAGTCTTTAGCAACTCCTTTGCTTTTGGGTGCTTTCTTTATCCTT
GTATTGCAGGTTTGCTTCTTCATTCTTTGAACCTTTCTACAGTAGGAGTATTTCTAATTAT
GGGTAGTCCTTGCCTATTGAATTGATGATTTTGTTTAGGTGGATTTAGCGTATTGGTTTA
ATAGCTTTTGATGATTTTACAATTTATATGGATTACCCTTTTCGTATTTCTTCAGAAAGAT
CAAAGATTATTGGGTATTTAGGACATCCTATGCTTTAGTTAAGCGTTGACTTGAAATCAT
GAGTAGAAGTAAATTTTAATAATTTTCTCATTACCTAGTGAGAATGAGAAAAGAGAAGTA
TAGACATGTTCCTGCAGTTAAATATATGGTTTGATGCAAATTACTTATGTGTTAGTTAACT
TACATGTTTCTATATATAACATGAGAGGAAGTATTGCTTCACAAAGAAATACAGAAAGGG
CAGAAAATGGACGAAAAACAATGGACTAGTTACAGTTTCTGCTTTGCTCTATGATTCTTC
CTCTACGTTATAGTGCTTTAGACATATGATGCATTTGCTACAAATTTTTAATTAATTTTCC
AGGTTAATAGTATTATAATGTTGAAAATAAAAATTGTGGAAGTGTTTCATCTTGATTAAAG
TGAAACCTTTAGTTCTGCGTTTGTGACCCACTGTGTCATACTTTTGTTCCTGGAGTTTCA
ACTCTGTTTCCTAAAAGCTTTTAGCTTGTCTATTGATGAATAGAATTGATGTGTTCTTATG
GAAAGCAGGTTGTTGCAGAGAAGCCAATATCTGAAGCTAAAGTTGAGTCTGCAATCCTT
AAGGTATATTCTTCTGTTCATGATTAAAGAAGATGTTAGTGCCCTTGTTGCTTCAAATTTA
AAACTTAAGAGCGCTTTTTGGATGATCGTGTAGGAATCTATCATCAAAGAGGTTAATGAA
AATGCCAAAGCTGGATGGAAAGCTGCATTCAACCCTCAATTCTCGAATTTCACGGTCAG
ATCATCATATATCTTAGCGCTTTCTCTAACCATCAACAACAGTTGCTTATTTTGTTGCTAT
ACACTGAAAACATGCATTTATAATTATGTCCATCTTTGGTATTCACAGGTTTCACAATTTA
AGOGCCTTCTTGGAGTTAAGCCCGCACGAGAAGGTGATTTGGAGGGAATTCCACTTCT
AACTCATCCTAAACTTTCGGAGCTACCAAAAGAGTTTGATGCACGAAAAGCTTGGCCTC
AATGTAGCACTATCGGAAGAATTCTGGGTCAGTTTCTTCTTGTTCTTGCTTACTACTATT
GAATTATAATTCTATGATAGTGATCCTAATGCTTTCCGTCTTTGCACATCAATCACTGGG
ACAAATTTGCATCACAGATCAGGGACATTGCGGTTCTTGTTGGGCTTTTGGTGCTGTTG
AATCGTTGTCTGATCGTTTCTGTATCCATCACAACTTGGTAAATTCTGTTGAACTGTGTG
ACCACCTCATTTAAAAGCTTTAGATGACGCATTTTTATTTACTTATTTATATATCTTCAGC
ATACTCTCTCATGTGCGAGCCCTGATTCTTTCTCATGGGCCAAGCACGTGGAAACTATC
TTATATTAGCACAAAATGCTTGTGAAGTTTTCACTATAGTTAATGTCACTAATGTTAACTT
TTAATGTGTAATGCAGAATATCTCTCTGTCTGTAAATGATCTGCTAGCATGCTGTGGCTT
TTTATGTGGATCCGGTTGTGATGGTGGATATCCTATATCAGCATGGCGATACTTTATCC
GTAGGGGTGTGGTCACAGAAGAGGTAAATGTTGTCTTATTTTCACCTCAAAAGAGATTA
CAGCTTTCAGTAAAACCATTAGTTACCGTGGATCTTTATGATCAATCACTAATAAAGTTG
TTTTTATTCTTGCAGTGTGACCCTTACTTTGATAATGAGGGATGTTCGCACCCGGGTTGT
GAACCAGGATATCCCACCCCAAAGTGCCAGAGGAAGTGTGTGAAGGAGAACCTACTAT
GGGGGAAATCAAAGCATTATGGTGTCAATGCATACAGAATCCACCGTGATCCCTACAGT
ATCATGACAGAAATTTACAAAAATGGACCAGTTGAGGTCTCGTTTACAGTGTACGAGGT
AATGACGATAAGGAAGAATGTTAAGTTCTGATCCTAAAACTATTTGATACAGCTTTCCGT
ACATGACATTATCTGAGCTGGTAACCTTATATGTGGTTGCCTACCTATCCCAAAATGAGA
TACATGTAATTATTTTTAGGTGACCTATAGTGTAACTGTTATGATAATTGAGAAACTTTAA
CTACCGATGTACCTTCCCAATTTATGTTTGCCCGAGATTTACTTGCAAACTAATATCTGT
AAATGAGATATTTAATGCTAACCACAAGACAATATCAGAAGTTACCTGTTGTCGTAAAAC
TGCATCATCTCTTTCTCGGTGCAAGTAGATTTGTTTAGATTTTGTTTGTTGTCTTTGATCA
TAACTGTTATCATCTCTTTTTCTCAGCAATGCTTTCCTCTAACCAATGAGTCAATTTTTTT
TATTTTTTTTTTGTCAATCACAGGATTTTGCTCACTACAAGTCAGGAGTTTACAAGCACG
TAACAGGTCAAAGTATGGGAGGCCATGCTGTTAAGCTTATCGGATGGGGAACTAGTGA
ACAGGGAGAGGACTATTGGGTATGTAGATGTGTTCAAGTTCTGGTGTCCTGTTTTCTAT
TTAAAAGCATATCTTTTTGTCAAAATCTAATCACCTTATATATCATCTGCAGCTTATCGCA
AATTCTTGGAACAGAGGCTGGGGTGATGTATGTCCTTAAATTCATCCCTATGTTTTCATA
TATGAGCAAAAAGTCCTTAGACATAGGCATGCTAGCTTCTTGTTGTTGATGCACTAACTG
GCACATCAATAAATGGATTTCAACTTATATAAACTAACAACGTAAACAATTTTTGCACTAT
ATTTCAACTGGTAAAGTTATCTCTGTGTGACCTATTGGTCACGGGTTCGAGCCGTGGAA
GCAGCCACTAATGCTTGCATTTGGGTAGGCTGTCTACATCATACCCCTTGGGGCTACG
GCCCTTCCCAGGACCCTGCGTGAACGCGGGATGCCTTGTGCACCAGACTGCCCCTTTT
ATATTTTAACCAGTTAAGGCAAGTTATTTACTGCATTTTTTGAAGTTACTCATTTAGGATT
ACTATAGAGAGTTACATGCCGTCGTATGTCATTTAACCTAATGATGCAAATAAATTGTAT
ACTATTTTAATGCACAGAAGTTAAAGTAGCTTCTTCTCTAAATGAATGTATATCTCCAATA
TGACAGGATGGTTACTTCAAGATCAGAAGAGGAACAAATGAGTGTGGCATTGAACATAA
TGTGGTGGCTGGATTGCCTTCTGCAAAAAATCTGAATGTGGAACTTGATGATGTATCTG
ATGCTTTCCTTGATGCCTCAATG
SEQ 11
CTATACCATCATACCCATGTTGGAATGTGCCACTCTGACAACAAGTGGAGATGTTACCG
ATGTTCTTTTGTTCCTCCATGTCAAAGAACCAAATACATATCCCTGTGTTGGTGCAGCCA
CCTTGAAGTTCACTGTAAAATTCATCTTCTGGTAATATCTAGTGAAGGCTAATCTTCGGG
GAACCACAGTGACATTGACACCCGTAGGTGCATAGACAACTGCCTTGTAAATGCTTCTT
GCTTTTCCCACGTTAGTAACAGTTCGAGTTACTGAATATGTGCTTCTGAGGTTTGGTATT
GTGATGGAGGGATAATTTAGTCCATTTGGTGATGCAAAGGTTTGATCACAGGTGCTATT
GTCCCTTGTAATCAGATGCAGAGATTTCTCATCATAACCAATTGAACAAAGAAATGCTCT
GTAATCTGCTGGCTGTGCATCGTATATAAGACCAGGATCCAGGACATTCGTAGGGTTAA
CAAAGCCAGAACCAAAATCAAATGGAGTAGCTCTCTTCCCTTCAGGATCTACTATTATG
GGTTTGTGATGCTTATCTGACAGTTTAGCTGCATTAATATTGATGAGATTAGTGCATTGA
AGGCTTGAATGAAAGAGTTAGATTATGTAAAAGCTTTTATTCTACCTGTCGTCATGATCG
CGGATTTAATTGCAGAGGGAGACCAAGATGGATGCACAGCTTTTAACAAGGCAACAACT
CCTGTTATGTGGGGGCAAGCCATAGAAGTTCCGGATAGTACATTGAAGTTCAACTTAGT
AGAAGCTGCTGGAGACCATGCTGCCAGGATATTTAATCCAGGAGCTGCAATATCAGGC
TACAAAGGCAAATCAGCCAGGAAATTACTTGCAAGAAAAAGCCAAATCCTCAAATAAGG
TAAGAACCAAAGAAAATGCAAAGTAACAAAGAACTAATCCACAACCACATTGACGATCC
AGGAAGTAAATATCAGGATGCAACATAAAACTTTGTTGGTCTACATGACAAAGGCAGAG
AGAGATCATTGTTGAAAACAAGTGGCAGTTGAAATTAAGTCCCTATATTACTATTTTTAG
CGCACAAATTACCTTCAAAATTTCTGGTGTTACAGAATTAGGACCTCTTGAAGAAAATGC
TGCTACTCGAGGAGCAGGTTGAGCTCCCAAAACGGTTCTAGCAGAGAGAATCCTTGCC
ATGGGGAGGCTGTTAATATAATAAGATGTGAGATTGGGAAGAGATGATAGTTAACAACA
TCAAAAAGTCAAGAAGAAGGAAGTGAACCGTGTATTGTTAATGTAAGCTAGGATCTTGT
TTCCAATCTTTTTCCCAACAGTTGCTGCAGGAATGACAAAAGGGATGGCCACACCCTTG
TCTGCGTCATCTATAAGGATCATCCCAACTCCACCGGCTTCTTTAACTATAATGCTTTTC
TCCATCTTTGACTCACTTGAGCTTCCAGCATGTAGGCACACAAGCACCTTCCCTTTGGC
CTTAGTTCTATTCAAAGAACTATCTAAGCAATAACTAGTGGAAAAGAGAGGGAAGGAAA
AAAGTAAATTAAGATAATTGTCAATGCATACATATCTACATTTAACAAACAGCGAAAGTA
CCTTATGATTCACCTGGATTGATAGGGAGTGAAGTATCCAGCATAAGCTTCAGAAGCAG
GTATGATTCTTGTAGATGTATTCATTTGAGATAAGCTAAGACTTTCACCCTTCCAAATATC
CACAACTTAATTAGAAAATAGAAATTGAATAATAATAACATGTAAACTTGTCGAAAACTG
GGATTACCTTGAGCCGAACTCCATTTCCTAGTAAAATATCAGAAGTAAAATCTCTATCAG
TTGAACTGGCTGCAACTGTGATCATCCAAGGAGCTAAATTTGTGGCTGAACCAGTGCTG
CCTTCATTTCCAACTGAAGCCACCACAAGTATTCCGCGGCTAACAGCATGATATGACCC
CACAGAAATGGCATCATTGAAATAATCTCCTTGGGGAGCATCAGGGCCCAAAGATAGA
GAAATGACATGAACCCCATCTCTAATTGCATCATCAAATGCAGCCAATAAATCAACATCA
TAGCAACCAGAACTCCAGCAGGTTTTATACACTGCTATCCTGGCCATTGGGGCACCACC
TCTGGCTCCTCCATTTGCCAAACCTTTGTAATTCATATTAGCTACGTAACGCCCCGCTG
CTGTTGAAGCTGTGTGACTCCCATGACCAGAACTGTCCCTAGCAGACTTGTAAAACATG
GTCTTCCCATTTTCTTCTTCAGCTTCATAGCCACTCATATAATATCTTGCCCCAATTATTT
TCCTACATAAGACAAATCATATTGCACTTATCATCTAAATAACAAAAGAAGAGATGGTTG
CCAATCAAAAGAAAACCTGTTGCATATAGAGGCATTGAATGCTTCTCCTGATTGGCATT
GTCCTTTCCATCCAGCTGGCACTGGAGGCATGTTGGTATCACTAAAACTTGGAGACTCA
GGCCAAATTCCTGTTTCATTAAATATCTTAAGAGCTTAACCTCAAGTTCTAATTAGCTCG
AAAAACAAGGGAAACAGTGGAGCTGGGGACCAGGTTGAGGATAAACTGATAAGGTTGT
GAACAGAGATAATATTTGCATTGAAACATGTCACTCTAATGTATAGTGGCTCTTCCCATA
AAGTAACATTTACAAGTAGTTCAAGCACACTGTTAGGCATAAATGCAAATGGCAAAATAT
GGGAAGAGGTGAGAAAGATGAACTGGGAAGCTAAGAAATTGCATAAACTTGAGTTTTAA
AAAAATCTAAGCAAACATATTTCATCATTCGAAAATGATTGAAACAAGAATTGATTGATGA
AAGGAACTACTTTCCTCAGGTTCAGCCATATGTACCCAAATGACAAACTTAGCACTTTTG
CAAAGTCATGTTATTGTACTCTTCTTAAGAAAACTAACAGAGACAAGAGCCCTTTTAAGT
GACAATACATTAAATGAAGGGACCAACACTAACTTGGTTGGTGCATTCCATCATTAAAC
GATCATATCTTTCACCTAACTCGGAAAAGATTGCTAGAATTTAAGATAATTAAAGCAAAA
GGAACAGAGAAACCACCTGTATCAATGAAACCAATGATTACATTAATTTGGTTCTTGGTA
GAAAAACCTGGAATTTCCATTGTTTCATCATCACTGAGCCCCATAAAATCCCATGAATGA
GTTGTGTGTAGGCTCCTCTTAGTATTTGGAAACACGGATACCACTCCAGGCATTTCTGT
TTTATTTTAACATTAAAGACAAATTTCTCAGTACTTATTCATATCATTACCTTAAAGAAAAA
CATTTGGCATGGGCTTACTGGATATTTCAGAAGCCTGTGCCTCAGTCAACTTGGCTGCA
AAGCCTTTAAAACCATGCCTATAACTATATACATGTGAAGTCTTGGCTTGTTCAATGCTG
TAAAGTTACAACTTCAGTTTTTTTGCTAAAAGCAACCAGTGTAAAACCCAATGAACCAGC
TCAAAAAAGGGAAAAACCCTCATAGCTAAAGGTAACAAGAACTGACCTTCCTTTATGAAT
AGCAGTCAGCATTTGATGGTTTTGCCTCAAAATCTCATCTGGGTGTTCATCACTATCTTT
GCTTCCCATGTACACCACATATAACTGGAAAAAAAAAAAAACCAAGAACACAACTTTACT
AACTATTCATCATTTCAAAACATCATTCAAATATACACCCTCAATAACAGCACATAAAAAC
CCATATCAACATACAGACTACAGAGCCAAAGTTTATTTACCTTGGAAGAAAAGCAGAGG
CTAATATCTCCAAGAAAAACACAAAGAAAGAGTAAAAGAAGAGTCTTTTTTAGAACACCC
AT
SEQ 12
ATGGGAGCAAAAGCATTTCTTGTTGCTATGTTTCTCTCAGCACTGTTATTTCCTTTTGCC
TCCTCATCCAATGATGGCTTGATGAGAATTGGCTTGAAAAAAATGAAATTTGATCAAAAT
AATCGGCTTGCTGCACGCATTGAGTCAAAGGAAGGGGATGTTTTGAGGGGGTCGATTA
GGAAGTATAACTTCCGTGGTAAACTGGGGGACTTTGAGGATACAGACATTGTAGCATTG
AAGAACTATATGGATGCTCAATACTTTGGGGAGATTGGTGTAGGCACTCCACCTCAGAA
GTTCACTGTAATCTTTGACACAGGTAGCTCGAATTTGTGGGTGCCGTCGTCGAAGTGCT
ATTTCTCTGTAAGCTTCTATACATGCAAATGATACAAAGGATAGCATTGAACATCCATCT
TGAGTGATGTAAAATTTGATGACTGCCTATCTTGGTGTAGGTTCCCTGTTTCTTTCATTC
CAAGTACAAATCAAGTGAATCAAGTACTTATAAGAAGAATGGTATGTTATGTTTCCATTTT
TGTATATTGCTTCTCTCTACCATCTGGTTGTTTATTGCTGCATGAAACATATATATGCTTC
CTTCTAGTGCCGGTTATTGTTTAGAATATGTGCCATCTTGTTCATTTTAGAACACTTTTTG
TATTGTCCTTATGTGTTTCTCACGGTGCATCAAGGGATTACATTGGAAAAGTTAAATGAT
GAGTACATGTAGTTGACTGTTGAGACATAAAAAGAGGCTGTTTATGTTATGTTTCTTAGT
ATATTACTGTAACTAGTGAGGTTCCAGAAAAGAAACACCAATATCCTTATCTCTCTCTGC
GATTAGTGCTTTTTGGTTGCGAGTTGTATAGTTTTAACCTCTGCAATGCCTCTTTAGGTG
GCCTTTCTTCTTCCCTATTAACTAGGTTTTGTATCCATGTCTTGGCATGTCTGTGACATA
AGAAATTTTCCGCAGAAAACTAGTTATTCTTGATTTTTTTGTTCTATTACAATTATATATGT
TGCTCAAAGAAAATGAATTGAACAGTCTGTAGCAATTGAATGGGTTTGCCAGATGAGTT
CACTCCAGTGTTATTGAAGGCCATTGCTTGGTCGTTTAAAGTTATGAAGCGATACAGCA
AGGGCTATCGCTTCATCGCTGAAGCCATGCACTTTAGAGAAGTTTGCACTTCAAATAAT
GGTGCACAAAGTGATTCCAACGAGAATTTATTGTTTCATTGAACATCAACTTTTAGAAGT
TGGATTAATGTTGGCATTTTCACAAAGTGATTCCTGTTGGGTATAAAAATAATATTCACG
GTATTAGTGATAAACGCGGAACACTAAGTTATGCTTAAATCAGTAAGAATAAAAATGCAG
CAAAAATGACACCAAGATTTTACCTAGAAACCCTTCTGAATAAGGGAAAAACCACGGCC
AAGAAGAGCAACTGATATCACTATAGCGAGGATTTTACACTGTGTAGTAACGAGTACGA
ATACTCCTAAGACCACTACACCCTCAAAAGAAATAAACACTCTTTTGCTTTTTCACCTCA
CTACAATATCTCTCACACTCTATTTTCTTTACAAACTATTTTCTTATAGTTTATGGAATACC
TTGCTCTCTCTTTTTTCTCTCTTTGTTGGTGTGTAGAAATGAGAGTTAAAGCTCTCCTTTT
ATAGCCAAAACCTCACTCTCTAAAGCCTACAATATTTGACAATTTGCACTCCCTTTTCAC
AATTTCAACAAGGTTGGCTACCAAACCAAACCAAATCAATAAAATTGTCTACCAAATCAT
ACCAATTCAACAAGGTTGGCTACCAAACCAAACCAAGTCAACAAAATTGGCTACCAAAT
CATTTGAATGAGATGGAAACCATATCAATCTCCCCCTCCAGTCTCATTCATCTAGAGGA
GGTAGCACTGTCTTCTAGTCTGAGTGCATGCCGACAAGTTCTTTGCATAGCTCGAACTT
GTCTCTTGGTACCACCTTGGTCAACATATCAGCAGGATTTTCACTTGTGTGAATCTTTTT
GACCTGAAGTGATTCGTTCTCCACTTGCTCACGAATCCAATGATATCTGACGTCGATGT
GTTTTGTTCTCGCATGGTACATGGAGTTTTTGCTTAGGTCTATTGCACTCTGACTGTCGC
AATAGACAACATACTCCATCTGTTGCAATCCAAGTTCTTGAAGAAATCTCTTGAGCCATA
TCATCTCTTTGCCAGCTTCAGTAGCCGCAATATACTCTGCTTCAGTTGTAGATAGTGCG
CACTTCTGCAACTTCGACTGCTATGATATAGCTCCCCTTGAAAAAGTAAACAAATATCCG
GTAGTGGATTTTCTGTTATCAAGGTCACCTGCCATATCAAAATCTGTATAACCTTTCAAA
ATTGGATTTGATCCTCCAAAACATAAGCATTCACGAGAGCTTCCTCTTAGATACCTGAGT
ATCCACTTTACAACTTCCCAATGCTCTTTTCCTGGATTTTCGAGAAATTTGCTAATAACAC
CGACTACATGAGCAATATCTGGTCGATTGCATACCATTGCATACATCAAACTTCCGACA
GCAGAAGAATAAGGAATCTTGGCCATTCTCTCTTTTTCCTCCGTTGTTGTAGGACACATC
TTCTTACTCAACTTCAAATGACCAGGAAGGGGTGTGCGAACCAACTTAGCACTTTTCAT
ATTGAAGCGCTCCACTACACGTTCTATGTACTTCTCCGGTGACAAGTAAAGCTTTCTTTC
GTTTCTCGAACGAGTAATTCTCATGCCCAAAATCTGCTTAGCATGACCCAAGTCTTTTAT
TGCAAAAGACTTATTCAACTGTTTCTTCAACTCGTCAATCTTGGATGCATTCCTGCCCAC
AATCAACATACCATCCACATATAGCAAGAGGATGATAAAATCATCATCAGAAAATCTTTG
TACAAATACACAGTAATCTGAAGAAGTCTTCTTGTAGCCTTGCTCCCCCATAACAGACTC
AAACTTCTTGTACCACTGTCTGGGAGCTTGCTTCAATCCATATAGACTCTTCTTAAGTTT
GCATACAAGATTTTCTTTACCTTTTGCATTGAAGCCTTCAGGTTGTTCCATATAAATCTCC
TCTTCTAAGTCACCGTGAAGAAAAACAGTCTTCACATCCATCTGCTCAATCTCCAAATCA
AGATTGGCAGTTAAACCAAGAACTGTCGGAATGGAGGACATTTTCACGATAGGAGAAAA
TATTTCGTCAAAGTCAATACCTTTCCTTTGACCAAATCCCTTGACAACCAATCTAGCTTT
GTATCTGGGCTTCAAACTATGTTCTTCAGCTTTAACTTTGAACACCCACTTGTTCTTCAA
AGCTCTCATGCCCTTAGGCAATTTCACCAACTCATAAGTATGGTTCTCATGCAGAGATTT
CATCTCATCTTGCATGGCTTCAATCCATTGATCCTTGTGCTCATCTTCTATGGCCTCCGC
ATAACATTCAGGTTCTCCCCCATCAGTGAGTAATACATATTCATTGGGTGAATAACGGG
AGGAAGGAGTACGAGGTCTAGAAGACCTCCTGAGTGGAATATCTAACTCGTCCACAGC
TTCGTGAGTAGGAGCATCTACCTCATCAACATTAGCATTGTTATCACCATCACCATCAAT
ATGCTGATCCAGAATATGGTTCTGGGCATCACCATCATCATTGAGCCCACCAACGTCAT
CCACATTTGTATGAGGAACTTGATCAAGATTAACTAAACCTTCAGAACTTGAAGATTTTA
GTTTCTCCGCTTTGTTAATATCTTCAATGGTTTGATCCTCCACGAAGATAACATCACGGC
TTCTCACGACCTTCTTCTCAATTGGATCATATAACTTGTAACCAAACTCATCAAGGTCAT
AACCAATGAAGATGCATTGCCTTGTCTTGGCAGTTAATTTTGACCTCTCATCTTTAGGCA
CATGTACAAAAGCTTTGCAACCAAACACTTTCAAGTGGTCATAGGAAATATCCTTGCCAT
ACCAAACTTTGTTTGGAACATCACTTTGCAAAGCAACCACAGGGGAAAGATTAATAACAT
GTGCGGCGGTCAACAAAGCCTCACCCTAAGAGGAATTCGGCAACTTTGCTTCAGAAAA
CAAACATCTGACTCTTTCCATCAAGGTCCTATTCATCTTTTCTGCTAAACTATTAAGCTGA
GGAGTCTTAGGAGGAGTCTTCTGGTGTCTGATACCCTGTTGTTTGCAGTATTCGTCAAA
CAGTCCACAATATTCACCACCGTTATCAGTACGAATACACTTCAGCTTCTTTCCAGTTTC
TCTTTTAGCTGAAGCCTAGAACTGCTTAAAGACACCCAACACTTGGTCTTTAGTCTTCAA
GATGTAGACCCAAAGTTTCCTTGAGCAATCATCAATAAAGGTAGCAAAATAAAGTGCAC
CACCCAAAGTCCTTGTCTTCATTGGACCACATACGTCTGAATGCACCAACTCAAGCAAC
TCGTCTTTCTTGAAAGAAGATGAGACTGGAAAGAAACTCTTTTTTGTTTTCCAGCCAAGA
AGTGCTCACATTTTTCTAATTTTGCACTTTCAAAATTTGACAACAATTTCTTCTTGGCTAG
AACATTTAGTCCTTTCTCGCTAATGTGGCTAAACCTCTTATGCCATAACGTTGAAGAGTT
ATGGCTCTCAACGGCATTCACCATATCAACACAGGTAGAGGTCGTAGTCCAATATAGAC
CACGACGCTTTTCCCCACGAGCCATAATCATGGAGCCCTTAGTGAGCTTCCACTTTCTA
GCACCATTGGTACTGACATATCCCTCATCATCCAAAACACCAACAGAGATCAAGTGCAA
ACGAACATCAGGTGCGTGCTTTACATTGTTTAAAACTAGTTTAGTTCCAATACTAGTTTC
CAAACAAATCATTCCAACACCAGTCACCCTAGATAAGTTCCAAAGTCACCCTGAGTATA
GGATGAGAAAATCCTTCCTTGATGTCACATGAGATGCGGCACCACTATCCACAACCCAG
CTTGACTCATCACAAGCAATATTTATCAAATCCGCATCAAGGACAATAACAAGATCTTCT
GTAGTGACGGTGGCCATACGATTGCCATCTTCTTTCTGTTCTTCCTTGTCTCTATTCTCC
TTTTTCAAAATCCGCAGAACTTCTTTGTGTGCCCTTTCTTCCCGCAATGATAACACTTAA
TATCTTTAAGTCTGCTTCTGGATTTGCTTCTATTATGTTCTCTATTTTGAGAACCCCGATT
CTTGCTTCTCCCCCTAGAGTCAGTCACCAAGACATCTGATGGGGAGGAACCTTGAGATT
TTCTTCTCATCTCTTCATTTAAAAGACTGCTTTTGGCAAGATCCATAGAGATCACACCAT
CCGGAGCAGAATTTGATAATGAAGTTCTAAGAATTTCCCAAGAACTTGGTAGGGAACCA
AGTAGAAACAGGCCTTGAATTTCTTCATCAAATTTAATGCTCATAGCAGATAACTGGTTC
ATGATCCCCTGAAAATTATTCAGATGATCTGTCATCGCAGAACCATCATGGTATTTTAAA
CCCAACATCTGCTTTATCAGAAACATCTTGTTGTTTCCAGTTTTCCGAGCATACAAACTT
TCAAGGTGCTCCCATAGGGTCCGAGCATGTGTCTCCCCAGAAATATGGTTCAAAACATT
ATCGTCAACTCACTGTCTAATAAAGCCGCAAACCTGCCTGTGTAACAGATTCCACTCTT
CATCTGATTTATTATCAGGCTTTACAGTGGCGAAGACAGGTTGATGAAAATTCTTGACAT
AGAGCAAATCTTCCATTTTGCCCTTCCAAATGGCATAATTTGTGCCATTCAAAGTAACCA
TTCTACTAGTGTTGGCTTTCATCGTTTATCACAAATACAAATACTATTTATTATGAGACCA
AAGTAATTCTTTTCTGATGTGGAAGTTCAGACTGTGCTGCAACCACAGAGCATACTCAN
NNNNTATTTATTATGAGACCAAAGTAATTCTTTTCTGATGTGGAAGTTCAGACTGTGCTG
CAACCACAAAGCATACTCAAACAGAACCTTGGCTCTGATACCACTTGTTGGGAATAAAC
CCCGTAAAAATAATATTCACGATATTAGTGATAAACGCGGAACACTAAGTTATGGTTAAA
TCAGTAAGAATAAAAATGCAGCAAAAATGACACCAAGATTTTACGTGGAAACCCTTCTGA
ATAAGGGAAAAACTACGGCCAAGAAGAGCAACTGATATCACTATAGCAAGGATTTTACA
CTGTGTAGTAACGAGTACGAATACTCCTAAGACCACTACACTCTCAAAAGAAATAAACA
CTCTTTTGCTTTTTCACCTCACTACAATATCTCTCACACTCTATTTTTCTTCACAAACTATT
TTCTTATAGTTTATGGAATATCTTGCTCTTTTTTCTCTCTTTGTTGGTGTGTAGAAATGAG
AGTTAAAGCTCTCCTTTTATAGCCAAAACCTCACTCTCTAAAGCCTACAATATTTGACAA
TTTGCACATCCTTTTCACAATTTCAACAAGGTTGGCTACCAAACCAAACCAAGTCAATAA
AATTGGCTACCAAATCATACCAATTAGTAATGGTGCACAAAGTGATTCCAACGAGAATTT
ATTGTTTCATTGAACCTCAACTTTTAGAAGTTGGATTAATGTTGGCATTTTCACAAAGTGA
TTCCAACTAGAATTGGTTGCTTCTTTGAACCTCAATTTTGAGGAGTTGCATTAATACGGG
GATTATTGTATATTGGATGCTGAAATTAGTTATTTCAACTGCAATTTGATTTTTATTGTAG
AGTAAATTAATAAATGTTTGATATTTTCTTGTTTTCTGTTAATTGTGCGCCTCACTTCTCG
CTATTCACTGCAAGTCTGTGGACCTTGTTTTATTTTGTTGCACGTTTTGGTTTTAAGAAC
ACTAGGTCACTCCTACCTAGGGGTGTCAATGGATATTAGAAAACCGACTTAACCGACCG
AACCGTACCGTACCGAACCGATTTTTAGGTTTCTTTTAAAGAAACCGTAGGTTTTTATAT
AAATCTATAATCGTACCGATAATTAGGGTAGGTTTTTTATTTTATAAAAATAAACCGAAAA
AATACCGAACCGTACCGAATAAGTTTTACATATGAAAAATATATTCATATAGTAAGTTTAA
AACTAGTAAAGTATTAAATTTTTCATTGGGTCTTGGAATTATGAAAACTGTTACAAGCCAA
TAAGTAATTAAACTCAAAATACTAATTCCTAAAACNNNNNNNNNNNNNNNNNNNNNNNN
NNNNNNNNNNNNNNNNNNNNNNNNNNNNNNNNNNNNNNNNNNNNNNNNNNNNNNNN
NNNNNNNNNNNNNNNNNNNNNNNNNNNNNNNNNNNNNNNNNNNNNNNNNNNNNNNN
NNNNNNNNNNNNNCTTTTATATAATTTAGATTTATCTTTTTAAATATTTAATATAGACTTTA
TTCTTGAGTCCCAACTTGGTTAATATCTTTCCACTCGTGTGATTTATATCTTCTTTGCTTT
TACTTGGTTTCTTTTCGTTGGTGTCGAATAGTTGTGTATTTATACTCTAGCCATCTTTCAT
GTTTTTTAATTCATTATCCTTTAAACAGTAAAAATGTCTAGAGAGTTTCGCTAAGTCCTAT
AAAAGAACGTACGTTATTGCATTCTATTTTTACTGGTGAATTTTATATGACATTTAAAAAA
TACCGAAAATTAACCGAACCGTACCGATACCGAAGTGAAACCGACATGATTGGGACGG
TTTCGAAAAGTCTAGTTTTGGTTATACATAATAAAATAACCGAAAAATTGGTATGGTATAA
ATTTTATAAAATAAGCCGAACCGAACCATTGACACCCCTACTCCTACCTTAATGAACAAC
ATTTATAACTTATCGAATGTTTCCACAAGACAGAGATCGTATTTGGCATAGTAATTTTAAT
GTGATTTCATTCGTGATAAATTTTTGATTTTCCATATAGGGAAGTCTGCTGCAATTCAGT
ATGGTAGTGGAGCTATTTCTGGATTCTTCAGTCAAGATAACGTCAAAGTTGGTGACCTT
GTTGTAACAGATCAGGTGAGTGAGGCTCCTCACTTGTTTTAAGTGTCTTGAAGGTAGAA
ATCTTACATCTCAAGGTGTTCATGTACTAGGAATTTATTGAGGCAACCAGAGAACCCAG
CGTGACATTTTTGGTAGCCAAGTTTGACGGTATATTGGGTCTTGGATTCCAGGAGATTT
CAGTTGGAAATGCTGTTCCAGTGTGGTACGTGGACAGCATTTAGTTTGCTCTCTTTCTTT
CCCACAAACCAAATTAAAGATCTAGACAATTCTTTTTTCCAGATGAGGTTTAACACATTG
AAGGATTAGATTTCCATAAATGCAGGATAGGCTGGATGTCTCTTTCTGTTTAAATTTGAT
TTGGCATTCATCTGGGCAGCATCTCCTGTCTTTTCCAGGTACAACATGGTCAAACAGGG
TCTTATCAAGGATCCTGTCTTCTCGTTTTGGCTCAACCGAAATACAGAGGAAGAACAAG
GCGGAGAAATCGTATTTGGTGGGGTTGATCCTAATCACTATAAGGGAGAAATAACTTAT
GTTCCAGTCACACAGAAAGGTTATTGGCAGGTTTGTCATTCCGTCAATTCGTTACTATGT
ATGTTCATGTTTTGTACAAATGCTATCTTAATCTTAGTAATATGATTGGCAGTTTGATATG
GGTGATGTTCTTATCGATGGTAAAGCTACTGGTATGTTTTGCTCTGTACCTTTTGAATTG
GATTGCTGAATTTTGCGAATATAGATGAGGGCTATGTGCCTGGATATAGTCTTCCTTTGA
GTTTTTAACATGAACATATCGGGTGTAGGTTACTGTGAAAGTGGGTGCTCTGCAATAGC
GGATTCAGGGACTTCTCTCTTGGCTGGTCCAACGGTATTATCTATAACCTTGATTTTGGA
CATATCGCTTTTTTGTTATGTTTTTGTTATTTGTTTCCACCATCAAAGTCAACCGCAATTC
GATTATTGATTTCCTTGTTCCTTTGAACCTTCAACAGGTTGCTCAGCAAGAAAAGTAACA
TTTTCCTAAGATTCATGAGTTAAATAGAACGAATCCAGTGTCTGATCTGTGTTGTGTTTT
AATTTTTCATCACAAAGAGGATGTTAGTGAAATTGGTTTTTCATTTCTGAGGTTACCTTTG
GATATACCATCTTAGCTTATCACTGGGTCGATGTCTGTAAATCTGCTTTCTCTTTCCTGT
CTTTCAGCTTAATATGTGTAAACCTGCCTCAGTAGGTACTTGTTGTTTTGTGTTACTTGC
TTTTATTACGCTTCAATGAGGATGATGCTTTTACTTCTGCTTTAGTCCTAGTGTTCTGTC
GACTTATTTATTTACCCCTCTTCTATTTGAAAGAAAATTATCCAACCCGAAAACTGTAGC
CAGGTTTTATCCTGTTGACTTGGAAATGCTGACAATTAAATGAAATAAAAATCTGCTGCC
TTTTGTCTCTACAAATTCAGGGGCGAACGTTTACCCAAACGGTGTCATCCGACACCGCT
TGGTCGAAATTTTTTACTGTATAGACATATATATGTGGGAAAAAACAGTACGCAATATAA
ATTATAAATGACCATTTATGCGTGTAGCTGTCTCTGGTATAATGGTCAAGTGCTGTTTTT
TCCCTACTTGACTTGATGTCGTGGGATTGACCTCAACGGATGGCATTTTTTTATTTCAAA
TTTTTTAGCATGGTCCTTTTAAAAACTAGAGTTTATATAGAGTTGAACCTTCAATATCATC
TTAAAAAAACAACTAAATCTGGGGGACATGACGGCTTCCACGTTATAAGTGATAAAAAAT
TTATTTGAATGCATAAAGGAAGCTGTTTAAGCATACATAATATAATTTAGAATAATAATTT
TTAAAAAATTATTCGACACCGCTTACTAAAAGTTCTGCGTACGCCCTTGTCTACAATTGT
ACGATTAAAACACTTCCAAGGTTGAGCAATCTTAAGCCCACCCTTTTCCGTACAGGCCA
TAATCACTATGATTAATCAAGCCATTGGAGCCTCTGGAGTTGCTAGCCAACAATGCAAA
TCTGTAGTGGAGCAGTACGGGCAGACGATCATGGATTTGCTGTTAGCAGAGGTGAGCA
TTCAACTGTGTAACAGCATTTTCATTTGTTTGATATGCAGTTTCCTGTGCAGTTACAGCA
AAATGACACTTGGCAATCTAGTTGCCTTTCCCGGTTATCTAATTGGTCCGCATTTAAACA
GGCACATCCAAAGAAGATTTGTTCACAGGTTGGAGTATGCACCTTTGATGGAAACCGCG
GAGTTAGGTTAGTCTTCAGGCTCTCTCTGCCCCTTCACGTGAACATATTGTGCATTTTGT
TAATCCATAATGTTGATATAAATACTGAATAATTCTGTGGCCTTTTTTCTGCAGTATGGGA
ATTGACAGTGTTGTAGACGAGAAAGCTGGCAGATCCACAGGACTGCAGGATGGTATGT
GCTCTGCTTGTGAAATGGCGGTCATATGGATGGCGAATCAACTGAGACAAAACCAGAC
TCAAGATCGCATATTAAACTATGTGAATGAGGTAAAACATCTGTCACTGCAATTTTCTCC
TTTTCTTTGAAAAGAATGCTGACTGACTGACAGCTTTGCGAGCGTCTCCCAAGCCCATT
GGGGGAATCAGCTGTTGACTGTGGAAAGCTTTCTTCAATGCCTAAAGTCTCTTTCACAA
TTGGTGGCAAAGTGTTTGATCTCTCCCCAAATGAGGTATGCTTTATAATGGTGTTTGCG
AGTAATAAACTTTGCTATGCCTCTTGTAATTCAACATTGTCAGAGAGAAAAATTAAGTGG
CTCATCATAGAGTCTTTTTGTGGCATTACAACTAATTGTCATATTACAAAACCGATTCTAG
TGTTTAAGGTTTTCAGTTTCTACAGAGAAGTAGATGTTTGTTGTCATCAAGAAGTACTTC
TATATTTTGAGGTTGTGAGTATTTCGATTTTACATCAATTTAGATGTCTCATTTTCCAACT
AAGTAATCTAAGAGAACCTCCGTAAGATCTTTGTGCCGTGAAAAAGTTACTCTTTGCTAT
TTGTATGGAAGTGTATTACATGCTGACCTTGCTAATGCAAGCCGCTTGAGAAGGCCCAA
TGAATCGAGATTTAGATGTCGTCCCCCCCACCCCCCGGGCCCCAAAAATAATAATAATT
TATATCTGGATGATTCAGCATGGAACAATTCTCTACCTTCATAGACAGGGGTAAGGTCT
GCGTACACACTACCCTCCCACACCCCACTTGTGGATTCCACTGGGTTGTTGTTGTTGTT
GTTGATTCAGCATAGAACAAATCTTACAAAGAAGAAAATTCATCAAGTGTACACCAAATC
AATTTGATCATTCACGTTTTTTCTAAATTTGTTTGTTTTGTGGTTTAGTAAACATAAAGAG
ATTGAGCTTTGAATAATTCAGGATAGATCACATCTTATAAAGGAAAAAATTCAAGCGAGA
CACCAAATCACTTGACCATACGCAAAACTTTTCTTTACCAGACCATCACTCTAGTCTTTT
CCTGCCCTTTCAACAAATTTTATTCAAGAATGAGAGTAAAGTTGTGATCCGATATGTGGT
TCTGTTTTACTTGTTTCAGTTGTTTGTTTAACTTGCTGACCTAGATTGATCTATATTCTAA
TTTTGGATTCTTTTCCCGTGATCAGTACATACTCAAGGTGGGCGAGGGTGCTAAGGCAC
AATGTATTAGTGGTTTCACTGGCTTGGACATTCCTCCTCCCCGCGGACCTCTCTGGTAA
AGTTATCTTTATATGTTCTCTCTATTTTAGTTTATAATTATGTTTTTTTGAGATAACTATCA
GCAATGTAGTTAATCCAACAATAAGCTTAATCCGAATTATAGAGCTACGGCACAATTAAA
CCCGAGCCAGCAATTCTTTTGTTCACTGAGTTCTCTATGGTATTCCTTTGGTTACAGGAT
CTTGGGTGATATTTTCATGGGTCGATATCACACAGTTTTCGATTATGGCAAACTCAGAGT
TGGATTTGCTGAAGCAGCT
SEQ 13
ATGACTTTTTTCAGGTCGTTCTTATTCTTTCTTCTCACCTTATTTGTTATTTCATCTGCACT
CGACATGTCCATCATTAGTTACGACGAACAGCACGGCCAGATGGGGACAACACATCAT
CGTACTGACGATGAAGTCAGAGAATTGTACGAATCGTGGCTTGTTAAGCACGGAAAGAA
TTACAATGCCATCGGAGAGAAAGAGAGAAGATTTGAGATTTTTAACGATAATTTAAGATT
CATCGACGAGCACAACGCTGAGAACCGCTCATATAAACTTGGGTTGAATCGATTCTCTG
ATCTTACCAACGAGGAATACCGTGCCATGTTCGTAGGTGGACGGTTGGATAGAAAGAC
GAGGTTGATGAAGAGCCCTAAAAGTAACCGTTACGCTTTTCAGGCCGGCGAAAAGTTG
CCGGAATCCGTTGATTGGAGAGAGAAAGGCGCCGTTGCCCCTGTTAAAGATCAAGGCC
AATGCGGTGAGTTTTTTTCTTCTTCAAAACTTTCCTACTATAAAGGAAAGCTCTGCTCTTT
ATCGTAAACATGTACTTTTGTTTTGTCTGCTTACGGAGTGAGACCAAGAGGAAGAGTTT
GGATAGATTGTTGAAAGGAGTCATATGTAGGTCAAAAGTTTTTGATTTTTAGGTTGTTTT
TTGACCTATGTTGTCGTCTTATACGGTCAATGATCTGTTATTGGGTAACTAATGATTCTG
TTTTCATGTTTATTTCAGTCAACAAATTGGAGAATAAATTAATTGCTGCTCTGTCTGGTAG
TTAATCTTCATGATATACACCTAAAGCTTACATCCTGATTTAGTATTTGGTGTCTCCAATT
GGAATGTTTATTTGCTTTGCTAGTGTTTCCTCTCTCTCTCTCTAGGGTAAATATAAAAAG
ATCTAAAATTTAGAGGTACCTGGTGTATATCTTAATATATTCCATGTACAAACTTTAAAAA
ATTATTTAAGCTTCCCCTAATTTGTTTAATACGCTGATAAGGGGTAATCAAAAAGCATAA
AGATTAGATTGAACGGACACAGTATATATTTTGCTTTTGCAAGTTGATCAGTTTCTTTCTC
CATTCTAAATCGGAATCGACCAGAATTTAAAGCGGTATAACTTAAGATTAAGCCATGAAG
ACATATTTGGCTATTCTAGGTGTTATAAATTTTAACCCAAGTGTCCTAGGGAATTGATGT
TTAATCTTGCTTTGATTATGACGAAACCCATATCTCGATTGGTTAGATATCAGTATATCTA
TGTTATGTATAGAATCCTCGTTTGAAATTTGAGATTTTCTTATGAAGGGAGTTGTTGGGC
ATTCTCAACGGTTGGCGCTGTTGAAGGAATAAATAAAATTGTAACGGGTGAATTAATTAG
TCTGTCAGAGCAAGAGCTTGTTGATTGTGATAGGAGTTATAACCAGGGATGTAATGGCG
GTCTCATGGATTACGCCTTTGATTTCATCAAAAATAACGGTGGCATTGACACTGAAGAT
GACTACCCTTACCATGCTCAAGATGGCACTTGTGATCCATACAGGGTAAGTAATTAACC
ATACTATCAAGAAAACATCCAAATATTAATTATGTACTATTTCAGAATGTAAGTCTATATA
GCAAGTAATTAATAGTATTTGCTGACAAAATTTGGTCATTCAGAAAAATGCCCGTGTTGT
CTCCATTGAAGGGTATGAAGATGTTCCAGAAAACGATGAGAAGTCGTTGATGAAGGCA
GTGGCAAATCAACCAGTTAGTGTTGCTATTGAAGGTGGTGGCAGAGCTTTCCAGCACTA
CTCTTCGGTATGGTGGGCGGATCTTGACTAATATATCCTTCTGAATATATATGTTATTTG
TGTCTGAACTCACTGGCCCTAAATTCTGGATTCGTTATTGCATTTTAGTATGCCTGTGTC
CCTAATCTGCAAACACGGCTGCATTGTGCCTTGTTTTACTACTTAAAGCTAGTATACTCA
TTTACCCTTCCAATTTTTATCAAATCATGCAGGGTGTTTTCACTGGATATTGTGGAACGC
AACTAGACCATGGTGTAGTTGTAGTTGGCTATGGAACAGAAAATGGCGAAGATTACTGG
ATTGTGAGGAATTCATGGGGTGCTAACTGGGGAGAAAGTGGTTACATCAAGCTTCAGC
GCAATTTCGCTAATTCTACAACTGGAAAGTGTGGAATTGCAATGCAGGCATCTTATCCT
CTTAAGTCTGGCGCAAATCCTCCTAATCCTGGTCCATCTCCTCCTACTCCTGTAACACC
ATCAACTGTTTGCGATGAGTACTATAGCTGCCCACAGGGCACTACTTGCTGCTGCATTT
ATCAATATGGCGAATACTGTTTTGGCTGGGGATGCTGTCCTTATGAGTCTGCTACCTGT
TGTGATGATAACTACAGCTGCTGTCCCCATGATTATCCTGTATGTGATGTTGATGCTGG
CACTTGCCTTATGGTAAATATTTTTTCCCTCCCATTCTGCTTTTTTCTCCTTTATAATAAT
GATCGTCAATTTCACTTATTACGTGTAATATTCTACCAGCACAGGATTAATTAGATAACT
CTGTCTACCAAAACTTTGGCAGATATTTAAACCTTCGTCTTCACTCGTTTATTGACCGCT
AGACCCACGTACAGATTCAACCTTTTATAGGTTTAATCATCAATGCAAGACTACTTATCA
CAATCTTTTTTCTTTTTATGTGACAGAGCAAGGACAATCCATTAAAAGTAAAAGCATTGA
AGAGAGGTCCAGCTAGAGTAAACTGGTCAGGGATGAAATCTAACAGGAAAGTGAGTTA
CGTT
SEQ 14
TCATGAAGAAACAATGATCAAATAATAGCTAAAAAGGGAAAACAGAGCCATCATAAGTT
GGCAAATGTAGGAATTGAAATGTGCTGGTGCATGGTTTATTGCAGGTCTAGATGACGGA
ACAGATGGAAACGAAGTAGCGGGTTCATTTCCACTTCCATTTCCCTTGGTGGCCTCTGG
CACCACACTGGAGGGCGACGGCGCTTCAGTAGAATTACGTTTGTTCACTGGCAGAGTT
GTCGATTTGTCGTTGGATTCTCTAGAATCATAACCTGACAAGAATGGTTTCTAGTTAAAA
TATGGACAGGTGTGCACACTAAAAAGGTCATACTCATGAATGCAAACTCACAATCGGAT
GGTTTCCAACCCAAAACCATCTTCTCTCGATCAAAAACCACGCGATAGCCTGTCATAAA
ATTTTCTGCAAAAAGATCCATGTATTAGTTTTCTGTCATAAATTCCAAATACAGAGACAAA
ATCGAAGTAAATCAACAAATAGCTCAGATTTTTGACTATGTAACCAGTTTTACTAGTTGG
TTATGGACTTGATTCTTACTAATTTACTTTGTCACATTCACATTTCCAATAATATATAAGCT
AGAAGTATGTAAAAAACTTGATAGGAACCAAAACTTCTAAAAGTTGGTAATTGTGAGATC
ATTAGCTGGCATGGTGCAAGTTATATTGCAAAATTCCATGGATAGAAACAAAATCTACGA
GCAAGCAACTGATAGATACTTACGTCCAATGATGTTGACATCCCCACTTTTCACAACAG
CTAAGCAAAATGCGCGAGAACCATCCTGATGATCATGACTGGGTATTAGAATATTCTAA
AAGAGAACTTCTGTAATAAAGAAGGAGCAGAAACCATCTTACCTGGAGCGAGAGCATAA
TTATCGGATCGAAAAGAAAAAACTGGTTGCCGCCTTTCATTGTCAAATTTAAATCAGGAA
CTTCGAATGTAGTTTGATTTGCACTGCGTATGTAGCATGTTAATCCTGAGAGTTCAAAGG
ACATCAAGAAAGTAAAAGTGATGAAGATTATAAAAGATGGTTCACCTTAGCCCGTAGCA
GTATTCAAAAGGAATTTCGCCATCAGGTTGAATACGTAGCTGTTTTGCTTGAGAATCAAA
CTGAAAAAAGAAACAAAATATCTTCAGTTTCACAATACAAAGAACAAACTCCCAACTAAC
AAATCATACAGTCAGCCTGTCACTCACGTTCTCTGTAATGACTTTGTAAGCTGGGTCGTT
CAAGTATGTGAATGAGGTGCCAGAGTCAAAAATGGCTGTGAAATCAACATCAGTGATCT
TGTTTCCCACTGTTATTCCTGTCAAGCTGATGTTATAGGTTGGGCTGCAATTCAAGGAA
GGATAAGAGTGAATACATATTTGGTCGAATTCTCCTGAATCAAGCCAGGAACAGAGGCA
AACGCTAAACCTAGAATATCAAATTGACTGCTTACTGTAGTTGATCAAGATTGAGTGGTG
TTTCTCCTTGGTCTGGACTCCCTTTATCTCCAAACACTATTCTTCCAATACCATCAGGGC
CAAAGCACATGGAGAAAGAATTTGCAGCAAGACCTTTACTTGCTAACATGCTCGGAACA
GATATACTTTCCAAGCCAAGTCCAAATAGACCATTAGGAGCAGCGCCACTTAAAAATGC
ACCGGTTTGTCTTATCCCACACCTGAAATTGAACAAGTAGAAAATTAACATCATGGTGGA
TAAAGATTGCATCCAAATTACACTGCATTTCTCTCAAACCATACCCACCCTAGAGCAATT
GGAGCCTCAACACTTTTTTGTTGAGCATTATCTGTCTCTAAGTGCAAGATGTCTTCCACC
AGTACCCCTGATGATGAGGTATTATTGGAGAGATATGCAACTCCATAAGCACATGCGTT
TTGTGAAGATAAGCATCGCCTCCTTTGTCCACACAGAGTGCCGTTGCAAGGAACAATCT
GACCCGTTGACGACGTATTAGGGCTGTAAATATTGAGATTTATTCGCTGTTTCAAAGCA
AACAAAGGATTATAAGTGTCAAATAATACATAAAGAAACATTAAACGGAAAAGGCAAAAG
AGCAAAGAAAATTTTGTTCCTGAAGGTGAAATCCTGTGGAGTATGAAGTAATTGAGCTA
GTAAGAATCTCAAAATTCTTCAATGACAAACAAGCCACGGAACAATATGGATCAGATATT
TCATTTCAGAGTCAGTATATTACATGCATCAAACTCACTTTGCAAATATTGATTATGTTGA
ATTTTGCGCTAGTTATGTATCTTCCTTAACAGAAAAACAATTTTCTCAATACATTCTCCAC
CCCATATCTTGTTAACTAAGAGAATATATTATTGTCATAATGACGGAAAAAGACAGTTGA
AGAGAAATCCACTGTGTTACAGATTCAGCCATTGTGTTATCAGCAGGTTCCTTTCTGAAA
AAGGTTATCAGACGAGGATGATCATCTTCCTTGTAGCAGAAGGCAACATACAGACGAG
GATGATCATCGAAAAAGAAAAACTCTTTAAACATTTGAAAGTAGAAAGAAAAAGGTACTA
GAATAAAGCAAACATACTCGTCCAGAGCGTGTCTCGAGGGCGCGCACACAATTGCTGC
AATCACAGGGTAGCCAAAACAAGTCACTGCCAGTGTCAAGTGCCACCAGAAATGATAG
CCCAGGAGTGCCCACTGTCACATTTGCATAATGCAAACTGCAAATTGGCAAAGAGTATT
AGTCACACACCTTAAGAAGAAAAAATCACAACTACAGATACTACATATTTTGCATTCAAC
TCTATCTTTATAACATATAAATTACAACATGCTACTGCAAGGAATTTTCAGAACAATTCCT
TGTCTAGAGAGGAGATAAGTGGCAGCAGAGGAACGGAAAATCAGAAAAAAAAAAATGG
AATTTATTTCCGGAGCATGGAATTCGAACTAGAAGAAGACTATAATTAAATTTAGAGTCA
GTACTTTTAATATAGGAGTGAAATCGCCAAAATTCCAGTCCGATGAAACACACAAACAG
AATTAAAGAACAGAAACAGGCCTAAATCTTTCTTTTTTTTGTTTTATCATATTTTCCTCCA
CATGAATCTCGTAAGAACTATTAATGGTACATGGAATTTATTTAAGTTAGGTAACCTATTT
TTCCTGAACTGACACATCCAACTAAACAGACAAAAACAAACGCAAAGCTCAGTCAACTC
TAACATCACACTAAACGGACAAAAGTAAAAGACAGTAAACAAGAATTTCCAAAAACGTAC
TAGTAGTTCACAATCAGGAATAACAACAAAAATATTTTAAAAAAAAAATAGAGCAGCAM
TAAACAACTGCAAAAGCAATCAGAAAAGAAAAATAGAGTGAGCTTACAATCCCAAAGAA
CTGAGGCGGAAAGTTTCATTTCCTCCGGAAAAAGAGAGAGGAGTGGGATTAGTTGTAT
CAGCAAGGCGGCGACCTTTGATAAAGCGATCACGCTGAGTCCAAGCTGAATAATACTC
AACACTTCCCTTCTCAGGCAATCCATGAAGGTCCAAAATACCCTTCACCGGATCCGAAT
ACCGGTGATGGATATCAAACCCGAACGTCCCAAACCCATCGCTGCTCTGCAATTGCAAT
CCCAGAATCGCCAAGAAAATAATAGGGGCAAGGAAAAAATTAAAACTTGTATAAGAATT
AGCCAT
SEQ 15
ATGGTGACAAAGTTTAGTATTTTTATTTTGGTGGTGTTGTTGAGGTTATTTTCATTTGGTT
CTGTAGCCTCAAGGGAAATTCACAATTCTGGTCTTAATCTGAATTCTAGTGCTTCTGGTA
TTGAATTCCCTCAACATCCAAGTTTCAACTCAGTTACTGCTTCTGGAAATTCAGATTGCA
GTTATGGAACATCCAAGAAATCAACAACCACCCATGTAATAACTCAAGAAGAAAATAGAT
CTGATGAAAAAGAAGATGAAGATTTAATGGTATCTAAAAACCAGCCAAGAGAAGCAGTC
AAGTTTCACCTAAGGCACAGATCAGCTGGTCAAAATATAGAGGCCAAAGACTCAATATT
TGAGTCCACAACAAGGGACTTAGGTAGAATTCAGACATTGCATACAAGGATTGTAGAGA
AAAAGAATCAGAACTCTATTTCAAGGCAAACAAAAAATAGTGAAAAACCTACACAATCTT
CTTCATTTGAATTCTCAGGCAAGCTCATGGCAACATTAGAGTCAGGTGTAAGTCATGGT
TCAGGGGAGTATTTCATGGATGTTTTTGTCGGTACACCTCCTAAGCACTTCTCTTTGATT
CTTGATACTGGTAGTGATCTTAATTGGATTCAGTCTGTTCCTTGTTATGATTGTTTTGAAC
AAAATGGTCCTCATTATGATCCTAAGGATTCTATCTCTTTCAAAAATATAAGCTGCCATG
ATCCTAGGTGTCACCTTGTTTCATCTCCTGACCCTCCACAGCCTTGCAAGTCTGAAAAC
CAGACTTGCCCTTATTACTATTGGTACGGAGACAGCTCGAACACGACTGGTGATTTCGC
GCTTGAGACGTTTACGGTTAATCTCACAACCCCTAGTGGGGATTCAGAGATCAAGAAGG
TGGAAAATGTGATGTTTGGTTGTGGACATTGGAATAGAGGCTTGTTTCATGGTGCTGCT
GGTTTGTTAGGACTTGGTAGAGGACCGCTTTCGTTTTCGTCTCAGCTTCAATCTTTATAT
GGCCATTCTTTTTCGTATTGTTTGGTTAATAGGAACAGCAATTCTAGCGTAAGCAGCAAA
TTGATTTTTGGTGAAGATAAGGAACTCTTGAAACACGCGAATTTGAACTTCACTTCACTG
GTTGGTGGGAAAGAAAATCATTTGGAAACATTCTACTATGTGCAGATAAAATCAGTTATA
GCTGGAGGTGAAGTGCTGAATATACCTGAGGAGACATGGAATTTGTCTACAGAAGGTG
TTGGTGGAACAATCATTGATTCAGGAACTACTTTGAGCTATTTTGCAGAACCAGCATATG
AGATTATAAAACAGGCATTTGTTAACAAGGTGAAGCACTATCCTGTTTTAGAAGATTTTC
CAATTTTGAAACCATGTTACAATGTTTCTGGAGTGGAGAAACTTGAATTGCCTTCATTTG
GGATAGTTTTTGGTGATGGAGCTATATGGAATTTTCCAGTAGAGAACTACTTCATCAAAC
TTGAACCAGAGGATATTGTTTGTTTGGCAATGTTAGGAACTCCTCATTCGGCCATGTCG
ATAATTGGCAACTACCAACAGCAGAATTTTCATATCTTATATGACACCAAAAGGTCAAGG
CTGGGATTTGCACCAACAAGATGTGCTGATGCC
SEQ 16
TCACATAGGAGCAAGATGACCTTCTTTAGACAATTTATCTTGCATCCACCTCTGAAGCAT
TTCCATTGCTGCCTTAGGCTGATCCATTGGAACCATGTGACCTGCATCATGGACCTTAA
GGAAAGTTAAAGGTCCATAGTTTTTTTGAACTCCTTTCTCTACACCATCTACTGCAAAAG
AAACTTGTGTGGCTTTTCCAAAGGCTTTTTGCCCTGTCCATTTCATTGCATGCACCCATC
TCGAATTCCCTGTCCATATAACAAGAAATAGAGTTTTATAATATTATTGTTAGTTGGTAGC
TTTGAATTGACTTATAAACAATATGATAGAGTTCAACTTCTATATTTTGACAGACGTAAAA
GATAACTTGAAGTAACTTTTGTTAAAAGTAGAATTACTAGCATGAAAAAATAAGGTAGGT
TAAAATACACTAATATAGTATGAAAATCCTCTTTTGTGTATATAAGTTAAATCCATATGAT
AATATAAAGCTTACCAAGCCAATTGCAGATAAGGTCATATTCCCCAGCATACACTAGTAG
CTTGATACCATCCTCAAGGAGTGAAGGAATTCCCAATTCAAGATTCCTCATCCAGTCCA
ACTGCATTGCCTGGTAAACTTCAGAGCTACATGAAACAAACTCAATATCCCCAACACCA
AGAGCCTTTTTAACTTGTTGATCATTGAGGAAAGTTTCCATTTTGGAGAAATCATAGCAT
AGATCGCCCTCACATCTCTTCCGCACATCATAGTACTGCAACTCGGAAATTACAAAATTC
ATATGACTTTAACTTTTGTATACTGACAGTGTAAAAAAAACTTTATTCTATCACGTCACTT
AAAGGATTGTAACTATAGATACCCGTTCATTATAAGTGAGATCAGTAATTTGGAAAATAA
GACAAGTAATATGTTGTACATCATTAGCTCAGAGAAAATGAGATTGGTCTTTCTTACGTT
TTTGTCACCAGCAATGTCCATAATCTTGTTGAAGATGCTTGTACAAACAAGATATGCAGC
CATGCAAGCAGTTCCGCCATCTTTTCCTAATATTATTTGCATAGAAGAAAGCTAATGTAA
AGACTAGCTGCTGCTATATGAAGAAGGAAAAGGACATTGAGGATAAACAAAATGAATTA
CCACAAAGCTTAATTGCTAGTTGACATTTTGGATATGACTTCTCTATGGCATTGTAATCA
GATTTTTTGATCAATTTCATATCCAGAGCATAGTCAGTGTAGGCTTTGTATTGAATTTCTG
GATCAGTGAGTCCATTACCAATAGCAAATCCCTAAAAAAAATTGTACTTTGTTAAGTCAT
TGGCATGACGACAAATTCAAATTAAACCTAACTAAAGGTAATTACTGGATAAAGAAAAAG
GGATGATATATGGTAAGAGTTAGAAATACCTTGAGATTTACGTAGATTCCTTCTTTATTTT
TGTTTCCTTGGTGAACCCGAGAAGCAAATGCAGGAATGTAATGCCCAGCATATGATTCT
CCAGTAATATAGAAATCATTTTTTGCATACTGTGGATGTGCCTTGAAGAAGGCCTATCAT
CAAAAGAATTTGAAAAAGTTTGAATTAAATTTTATTAATTATATCAGTTAAACTTTAGAGAT
TTATCACGAGCTAAAAAAAAGGAATGAAAGAATAGGATCAACCTGCAAGAAGTCATAGA
GATCATTGCTTACGCCCCTTTCATCGTGACGAATATCATCATCGTTTGAACTATAACTGA
AACCAGTTCCAGTTGGCTGATCGACGTATATAAGATTTGAGACCTGTAAAATTGCAATTT
ATCATATGTTATCATTCTTCAACTAACAAAGGAAAGTTGCATGTTTGATTATAGGATTTAA
CCGGTGTAAACGATTTTTACACTATTGTTATATTTTAACATGTTGTAACATGTTGTATTCG
TCCCACTTAAATAAAGTGAAGAGAAGCGTAGTAGTCATTGATGTCAATAAACGTTGAACT
ACTTTCGAATTTTTGAAATTCTACAAGTCACAGCTAATGAACAACAAGTGTTAAAGAAAA
AAATGCTAGTAGGTAAAAAGGTATTTTGCATGATGGAGAAAGGTTGAATAACAAATAAAA
ACATGGAGGGAATTCTTTTAGATTTTTACCATATTCAAAAGATCTAACTGACGTTTCTTGA
GAAATTAATTGGGTAAAATAAAAAGAATAAACTGAAAAAAAGAGAGGAAAAAACAAAAGA
AAAAGCAAAAGGAAGAAAACAAGAACCTTGTCCCAGCCGAAATCATTCCAGACAAGAGA
CATGTTATCTGCAATTTTGAATGGTCCATTTTCATAAAACACAGCCAATTCACTGCTACA
TCCTGGCCCTCCAGTTAGCCATATAACTACTGGATCATTCTTCCTGCTCCTCGATTCAAA
GAAAAAGTAAAACATCCTGCCAAAAACAGATAATTTAGCATTAATTAATAATACCCATAAA
TTCATTTTTTTACCAAAATGAAGCAAGAAGAACATTTAATCCAATTCAAACCTTGCATCTT
TAGTATGTGGAAGACGATAATAACCAGCGTGATGACCCAAGTCTTGAACTGTAGACCCA
GAATTACCAACATAAGATAAATTCAATTTCTTTTCAAAAAGTCTCTGTTCAGTAACTGCTG
CAGAATCCCCTGTTGCTGCAGCCTTGTTGATATCATGCTTAGGGAATAAATTAAGCTGT
CTGATTAGCTTTTCTGCCATTGTTAATGGGAATTTTGGAGTAGAAGATAGGAAAAAATCA
TCATCATTAGAATTTAAAGTTGATGAGAAAGATAAGGAAATAGAAGCAAGAAGCAGAGT
AAGAAAGAGAAGAGAGAAAGATGAAGGCAT
SEQ 17
TCACACGACACTTTGGGGTGGGATATCCTGGTTCACAACCCGGGTGTGAAATCCCTCA
TTATCAAAGTAAGGGTCACACTGCCAGAAAAAACAACTTTATTAGTGGTTGATCAAAAAG
ATCCACAGTAGCTAATGGTTTTAGTGGAAGCTGTAACCTCTGTGAGGTGAAAATAAGTC
AGCATTTACCTCTTCTGTGACCACACCCCTACGGATAAAGTATCGCCATGCTGATATAG
GATATCCACCATCACAACCACTCCCACGTAAAAAGCCACAGCATGCTAACAGATCATTT
ACGGACAGAGAGATATTCTGCAATACACATTAAAAGTTTAGCATCAGTGACCATAACTAC
AGAAATACTTCACAAACATTTTGTGCTAATTAAGATAAGATGGTTTCCATGTGCTTGGCC
CATGAAAAAGAATCAGGGCTCGCACGTGAGAGAGCATGCTGAAGATATATAAATAACTA
AATAAAAATGTGTCATCTAAAGCTTTTAAATGAGGCGGTCACACAGTGCAACAGAATTTA
CCAAGTTATGATGGATACAGAAACGATCAGACAGAGATTCAACAGCACCAAAAGCCCAA
CAAGAACCGCAATGTCCCTGATCTGTGATGCAAATTTGTCCCGGTGATTGATGTGCAAA
GATGGAAAGCATTAGGATCACTAAAATAGAATTATAATTCAGTAGTAGTAAGCAAGAACA
AGAAGAAACTGACCTAGAATTCTTCCGATAGTGCTACATTGAGGCCAAGCTTTTCGTGC
ATCAAACTCTTTTGGTAGCTCCAAAAGCTTTGGATGAGTTAGAATCGGAATTCCCTCCAA
ATCACCTTCTCTTGCGGGCTTAACTCCAAGAAGGCGCTTAAATTGTGAAACCTGTGAAT
ACCAAAGATGGAGATAATTATAAAAGCATATTTTCATTGTATAGCTGCAAAATAAGCAAC
TGTTATTGATGGTTCGAGAAAGCGCTAAACTATATGATGATATGACGACAAGAGGGGGT
TGCTCCGATGGTCAGCATCCTCCACCTACGACCCCAGGATTGTGGGTTCGAGTCACCA
AAGGAGCAATAGCTCCAACAAAGAGGATCACAGGGGAATCAAAAGGGGAGGGGAATTT
TAAAAAAATGATGATCTGACCGTGAAATTCGAGAATCGAGGGTTGAATGCAGCTTTCCA
TCCAGCTTTGGCATTTTCATTAACCTCTTTGATGATTGATTCCTGCATGATCATCCAAAA
AAGCTCTCTCAGTTTTCGAATTGAAGGACAAGGGCTATAACATCTTGAATCATGAAAAGA
AGAATAATGTACCTGAAGGATTGCAGATTCAACTTTAGCTTCAGATATTGGCTTCTCTGC
AACAACCTGCTTTCCATAAGAACACATCAATTCTATTCATCAATAGACAAGCTAAAAGCT
TTTAGGAAACAGAGTTGCAATTCCAGGAACAAAAGTATGACAGTACTGTGACAAACAAA
GAACTAAAGGTTTCACTTTAATCAAGATGAAACGCTTCCAACATTTCTTATTTTCGACATT
ATAATCCTCTTAACTTAGGAAAATTAATAAAAAATTTGTAGCAAATGCATCATATGTCTAA
AGCACTATAACATAGAGGAAGAACCATAGAACAAGCATAAATTGTAACTATTCCATTATT
TGTCCTCCTTTTTCTCCCCTTTCTGTATTTCTTTGTGAAGCAATACTTCCTCTCATGTTAT
ATATAGAAACATGTAAGTTAGCTAACACATAAGTAATTTGCATCAAACCATATATTTAACT
TCAGAAACATGTCTATACTTCTGTTTTCTCATTCTCACTAGGTAATAAGAAAATCATTAAA
ATTTATTTCTACTCATGATTTCAAGTCAACGCTTAACTAAAGCATAAAAAGTCCAAAATAC
CCAACAATATTTGATCTTTCTGAAGAAATACAAAAAGGGTAATCCATGTAATCATCAAAA
CCTATATAAATTAAACCAATAATCTAAATCCATCTAAACAAAGAAATACTCTTACTGTAGA
AAGGTTCAACGAATGAAGAAACAAACCTGCAATATAAGGATACAAAAAGCACCCAAAAA
CAAAGGAGCTGCTAAAGACTTCAGAGTCAAGGTCAT
SEQ 18
ATGTTCCGACTAGTAATGGTGACAAAGTTTAGTATTTTTATTTTGGTGGTGTTGTTGAGG
TTATTTTCATTTGGTTTTGTAGCCTCAAGAGAAATTCACAATTTTGGTATTAATCTGAATT
TTAGTGCTTCTGGTATTGAATTCCCTCAACATCCAAGCTTCAACTCTGTTACTGCTTCTG
GAAATTCAGATTGCAGTTATGGAACATCCAAGAAATCAACAACCACCCATGTAATAACTC
AAGAAGAAAATAATTCTGATGAAAAAGAAGATGAAGATTTAATGGTATCTGAAAACCAGC
CAAGAGAAGCAGTCAAGTTTCACTTAAGGCACAGATCAGCTGGTCAAAATATAGAGGCC
AAAGACTCAATATTTGAGTCCACAACAAGGGACTTGGGTAGAATTCAGACATTGCATAC
AAGGATTGTAGAGAAAAAGAATCAGAACTTTATTTCAAGGCAAACAAAAAATAGTGAAAA
AACTACACAATCTTCTTCATTTGAATTCTCAGGTAAGCTCATGGCAACATTAGAGTCAGG
TGTGAGTCATGGTTCAGGGGAGTATTTCATGGATGTTTTTGTTGGTACACCTCCTAAAC
ACTTCTCTTTGATTCTTGATACTGGTAGTGATCTTAATTGGATTCAATCTGTTCCTTGTTA
TGATTGTTTTGAACAAAATGGTCCTCATTATGATCCTAAGGATTCTATCTCTTTCAAGAAT
ATAAGTTGCGATGATCCGAGGTGTCACCTTGTTTCATCTCCTGACCCTCCACAGCCTTG
CAAGTCTGAAAACCAGACTTGCCCTTATTACTATTGGTATGGAGACAGCTCGAACACGA
CTGGTGATTTCGCGCTTGAGACGTTCACGGTTAATCTCACAACCCCTAATGGGGATTCA
GAGATCAAGAAAGTGGAAAATGTGATGTTTGGTTGTGGACATTGGAATAGAGGCTTATT
TCATGGTGCTGCTGGTTTGTTAGGACTTGGTAGAGGACCTCTTTCGTTTTCGTCTCAGC
TTCAATCTTTATATGGCCATTCCTTTTCGTATTGTTTGGTTAATAGGAACAGCAATTCTAG
TGTAAGCAGCAAGTTGATTTTTGGTGAAGATAAGGAACTCTTGAAACACCTGAATTTGAA
TTTCACTTCATTGGTTGGTGGGAAAGAAAATCATTTGGAAACATTCTATTATGTGCAGAT
AAAATCAGTTATAGTTGGAGGTGAAGTGCTGAATATACCTGAGGAGACATGGAATTTGT
CTACAGAAGGTGTTGGTGGAACGATCATCGATTCAGGAACCACTTTGAGCTATTTTGCA
GAACCAGCATATGAGATTATAAAACAGGCATTTGTTAACAAGGTGAAGCGCTATCCTATT
TTAGATGATTTTCCAATTTTGAAACCATGTTACAATGTTTCTGGAGTGGAGAAACTTGAA
TTGCCTTCATTTGGGATAGTTTTTGGTGATGGAGCTATATGGACTTTTCCAGTAGAGAAC
TACTTCATCAAACTTGAACCAGAGGACATTGTTTGTTTGGCAATTTTAGGAACTCCTCAT
TCGGCCATGTCGATAATTGGCAACTACCAACAGCAGAATTTTCATATCTTATATGACACC
AAAAGGTCAAGGCTGGGATTTGCACCAAGAAGATGTGCTGATGCC
SEQ 19
TTACAAAGGTTGCTGAGCTATCCATCTTTTAAACATATGAAAGCTCTCTTCACGTTTGTA
CTCAGGAGCTGTGTGCCCTCCTCCCTAAAGAGAAAAAAAGACAAGAAGGAAGAACAAA
AACATCTGAGAACTGTGAAAATGTGAGCACAAGACAATTTTACTATCGAGTGTGAGTAC
AAAATTCTAACCTTTACTGTTGCATATGTCATATGATTAGAGAAAGATCTTGTGTAACTG
CACATCAAAGCTATAAATTTAGAATTTCATAACAATTATATCGTCTATCCAACTGGAATAG
AGATCCAGAGAAATTAAAATGGAGAATCATACCCTGCAACTTGACCATCAATTGTCCAA
GGGCGCCAATCATCAATGATAGAATAATTTAGATACTTTATCCATGCTTGCGTCGATTGG
AAAGGAACAACCATGTCATGATCACCACTGGGCAAAAAAAAAAAAAAAAAAAAAAAACTT
TGTTATGTATATAATAACTTCAGCTAAATCTTTTTTGCATAAAGCACAAATTAGAGAACTA
CAAACATTGGTTTAGGTTTAAAGTATCAAACCTGTATATGAGTGATCGATAACCTTTGGA
ACTAAGGTTAACATGGTAAGGTATACTATTCATGAAAGTAACTCTATAAGTTGTACCCAT
AATACTTTGCCTACATCTCGCCCACGCTCTTCTTATAGTTCCCTAATCAAAGAAGAACCA
AAAAGAAAAGAAAAAAAGCCTTTTAATATCTTGCACCTTAATGCCAAGCAACCTTCACTA
TGTACAAGTACAAACAATTGAAATACCTTTCTAACATGGAGAGCCTCTTGAACACTAGG
GTCATTTGCCCAATGATTGGAGAGCTTGCGTGTCGCAACCTAAAATCAGAAAGCATATG
TATATCTAAGTATCCTACATTTATCTGTTTATCCCGAGAAATCATGAAAAAGAACCGGGC
ATATATGCCTCTTTTAACATAAATAGGTATATATCTTAAAATTATTAAACAATATTCAAACT
TTATTCGGTGTAAAGGCATTTAGTTGCTGCAATATTCAAACTTTATATAGTAATATTTGAG
GGACTTACACGACTTTCTCGACAAATGAAGTCATCATGTTTTAGAAAGATAAAATCCTCT
TCAAGAGATCTCCTTTCACCAGACAATTGGCGTGGGTTTGGCGATTCTGAGTCCGTTCC
ACAAAAAGGCTCTAGTATTTGCTGATCATTTATACTGCTTACAAGCTACAAAGTTGCATT
ACATGAACATTGTGGTATTACCTAATTACAAACTTAGTACCAATTCAAAACATTAAAACAA
GAATATGTAAGAAGGAATATAACCTTACCTTCTTGAACATTTTAAAGTTTTCTAAACATAG
TTTATTGGTAGGATCAATGTTTCGGCAATCGCCTTTGCAAGTCTCCTTCAGTGACTGATA
CAACAAGATCCAAATTATCATTTTTGTGCCAAACTGTGTTGGTATGATACAAAGTTAATAT
ATGAATTGAAGTAAGAGATGAACCAACCTCATAAAGTTCATTAGATATTAGTCCCATACC
ATGACAGAAAGGAATTTGGTAATTGCTTTCTTCAGGAAATGTTAGCGGATTGCCAAGTG
AATAACCCTGAAAGGATATTAATTACCATTAAAAATAATAATTTTTCATGTATGAGATATA
TTTTAAATAAAAGGAAAGGAATAGAAAACCTTAAGGTTGATTAGTGGCTTTTTGCCTGCT
TCAATTCCTGCATTTTCATATCACTCTTGAAGTGTCAACAGAGAACACTTTGGCTAGAAA
TGTTTTGAGAATCTTCTCTTCAACCAAGTGAGGCTACACATTCAGTTTTGAAGAGACAAC
AAAAGAATGTAGTGTTCTATATATCTTATCTAATATCTGTGGAAGTAATGATCAATAATAA
CAAAGCATAAACTTGGCTTAGAGCCCTAGGAATGGAGAACCTTTGATCAATAGAGTCAC
TTTACTCCCCCTAGTGGACCAATTCAGCATTAATTGCCAGCGGGCTTCAAATAACGAAT
GGCTAAACCGGAAAAATAATAATAACAAAGCATACACTAAAGAGTGATGGGGTGATGAG
AACGATCACAACCGCACATTATATGAAAATACTAAATGACACTTACCATCTGATATTAGT
TGAACAATAACTGGAACTGTAATGCCTGAATATGAGTCCCCAGAAACATAGAAAGGGTT
GGAAATGAATTCTGGATGATTATTGAACCACTGCAAAATAAATCACAACTTATTTCGCGA
TACATTTTTGTTATATTTGGTTGCTATTTAATTATTACTGTCTTCATTTCTTCACGGTTCAT
TTGATCAATCCACCAAGATACACATATATTAGGATTTAGGTGGGTGGAGGGAATTCAAA
TACGTATATATTGAGCCTAAAAAATTTATATCCTAGATCCTCTACCAATGAACAATGCAAA
ATGAGAAGTATATTGAGGAATACATGAAAATTCAGAGTTAACTCTGCTTACTAATTCAAT
CTAAAAAATACTCAGTTTACTAATTCATATGTATCTAACTAAATGAACTTGAAATGATTTT
CAAATACCTTTAGTAGAAATTCATAGACCTGGTCGCACGCTTGTAGATCAGTACACTTG
GATGCCGCTGAAGTTGTTGCATATGAGAACCCAGTATTTACAGGCTGTTCCAAGAAAAG
TATGCTCGCAAACTACCAAGTTTAAGGAACACATTAATTTGATGATCTAATGTTAACCAT
AAGAGGATAAAAGAGAACATGAAGTGTGGATTAGAATATATATGCAGTTTGTTGACAGC
AAAATGAAGTGTGCAATAGAAAAATAACATGCTCTTCAGTGTTACCTTTGTCCAGGAATA
TGGAGTTGAAACAAGAATTGGTAGGCTCCCATTGTATGCCTTCTGACCAAAAGCCAATG
GCCCTACAAAAGAGAATTCAGAAGTTAATTTTCTCCAACTATGAGTTACACGTAATACCA
AGCTTTTCCACACCTATATATTTACTACTAATTGACTAATTAGAAACATCGACTAAAAGTA
AATTGCTTTTGTGATACTAACAAAAGCATTTCTCAAATGAGTTAAGTTAATCACAAAAGGT
TAAACTCTATTTGACAAAAATTACATTTGAACACAAACAATAATGGTAACTGTTGGGATAA
AGATAACCTCCAGACTATGATTACATATTTAAGGTGAGTTACTGATAAACATACTTGATA
ATACAATAGTAGTATAACTAACATACTATCATAGGTTAAATAATATTTTATAAAAAATATTT
ACATTGTCAGTATATACAATATAAATATTTACCTACTTCATACGCCACACCCGTGAAGGA
TGAGCAACCAGGCCCTCCCGTTAGCCATAGCAAGAGTGGATCTTTTTTAGGGTTGGATT
CTGATTTGACAAAGTAATAGAATAGTTGCACTTCCTCGGATTTGCCAACTCCAATATATC
TAACAATTGTATTCAAAATACATCACTTCAACAAACTTGTTTTACTACTCCACTATATATG
TAGCCAGTATGTTCTGAATGAAGTAAATTACCTAAGAAAAAGTTTAGATTCTTTTTATACT
AATTGATCTTTTGATCAAATACAAGTTAAAATTCAAAGGGTGGTAAAATTAACGTACCCA
GTCTCAAGATAAAAAGGAAGAGGGCCATCAAAACCAGGAAGAAACTCAACAGTTGAGC
TATTCTGAGGAAGACTTTGTACATATTGTAGAAAGAGAGTAAGAGGAAGAAGAAGATGA
AACAATAGTGGCAGGCGAAAACCAGACAT
SEQ 20
TTAACCAGCTAGAGGATTCATCACACTGCCAATGAATAACACCGCACCAGTAGATTCGT
CTCTTATAAGGAATAGGAATGGATGGTCCGCAACAAAATCCATTTCCTTCTCAATAATCA
AGGACATGGTCATTATTACAGTAGCGGTAACAGCTGCAGCTTCGGTTCCTTCCTCATTT
ACCTCAATGAAAGACTTGTGAAAAACCTGTGAAACAGACAGGTTCTGAGGCATAGGAGA
ATCAACCATCTCAGTGAGGCTACCACCACAAAAAGGCAACGTGAGGCCGAGTCCCTTT
AGAATGTTGGAAGCTTCAAATCCAAAAGTTATTTTAAATTTAGGGATAAGAAACTTGCGC
GCTCTAACTTTTCCATATGGAACATGGTTATTTAAAAATCCTGGTTCTAAGCTGATTTTTT
CCAGTAAAGCAGGTAATCCATCATGGGCATCTGGGAGAATGAAATACATACAGAAGCG
ACGCGTATCCGTGCCTTGTTTATAAGGAAGCCTCAATATTTTAAAGCAATCAAACGCTG
CTATGTACTGCTTCTTCTTGCTAGTCATAAATGGTGCTTGAATAGACCCTCCATTGAGGA
GATGGAAGTCATGATCTTTCGTTTCTGACACATCGAACTTCTCATTCCATTCTCCTTTGA
AATATAGTGCATTGGACAAGATCAGCCTTGTCATGTTGTTCACTGCATCGCGAGGAAGA
ATCTCTTTGATAAGACCATTTGTCTCCAT
SEQ 21
TTAGAAAAAAAGCCAATGCTTCTTTCTGCGCACTCTAGCTGGAACCTCTGTGGCACATT
ATGTTCAAAGTAAAGCAAAAATTAGTATTCAAGAATAGCTATGACAAAAAATTCTGAACT
CAGAAATAGTTAAAGCAAGAAGACACTTACCTCCAATTTCGTATAACGAATTGTAGTGAA
CTTCGCTCCAGAAACTCAGCCACAATTCTGAAAATCAAGAATAACAAGTCAAAAGTTTTG
TCTTCAAGAGATTAAACATATCGAGAAGAAATGTTCGTCAGCGCCACACCAACACATTT
CCGAACAAGTGATTTGGAATTTATTTACTTGTTAAGATAAGAGTTAATCTGATCAGGTTT
ACTCAGTCTTTCCTAAGATCACCATGGATGTGTTTGTTTATGAAAATATAATCAGCAGAA
CATCATCAAACATGTTAAAGGGGAGCTTTGGAGCAACGGTAAAGTTGTCTCCATGTGAC
CTATAGGTCACGGGTTCGAGCCGTGAAAGCGGCCACTAATGTTCGCATTAGGATAGAC
TGGCTACATCACACTCCTTGGGATACATCCCTTCCTCGGACCCTGCATGAACACGGGAT
GCCTTATGCACCGGGCTGCCTTTTTTTAATCATTAAACATGTTCAGCATATTCAATTTCTT
GAGAAAACAATTTTAGCATAACAAAAGAGAACTATTAAAACAGGAGCGACGATCTGATG
TTACTTTATTGGCAGCGGATCAAGTTTATCGTCTGTAACAAATAACGCTTAATAAGTGCT
TGCATCAGTAAATTGTGTGTTTCACGTGAAGCAAGACTCTGGAGATAAATTCTCCTGATA
GCAACTAATACTGCTCTTAGTAAGAGCATCAGGAAACTCTGTACAAAGCTTACATTCACT
AATTGTAAACATACAAATGATCCACAGTTCACAAATGACAGCGAAGGATTCTTGTCATTA
GAATCAGCCTCGTTCAATGATGCAACAATGTCATTACAAATTAAAGGTGTTTTAGTTTTA
CTATTTAAAAATTAGTTAGTACCAATTCACTTCGACATACTTCCACTCACAATCTATTGTG
TGTGGTACCAAGCAATACGATGATACTTTCTCCTAAATGAGAAAAGCACATCCATTTGTC
AAAATAAACAAAATGATTCATTTTTGTTTTCCTTTTTTTTCATTTTTGTTTTCCTTTTTTTTT
CATTTTTGTTTTATATATGTATTCTTATAATAAAGTGGGAGCATGCTAGAGAGTTCAAAGT
AGGACCATGCTACAAAGTTCAGAAGAATACTTTTGGTTTAGTGTCTCAAACAAAACCAG
CAAGTACTATTATTTAAATTCTGGAATTTATATCATAATATCATTATTTTAGAGTTATTTGT
AAATTTCAAGTATTTATTTTATTTTTTGAGTTTAAAAACTCAAGCAGGAAGTTAAAGAACT
AATAATCAGAAGTATTGATTGTGCCATGATCATTAGATACAAATAACATAAAATGTATGTA
CCCCTAGAAGGTTGTATGTCCTTGGGAAGAATATCAATGTAGCCGTTGTCTCGGAAAGA
CGTGACCAAACATATTTTTACCCCAAACTGCAAACAAAATACAAGCAAACACAAGTACCA
TCAGTCACCCAAAACGGGAAAGCAAAAAAATAAAAATGCAGAGGGCATAAGGGCGAAA
GGCTGATTAACAACACAAATATCTAAAGCAGTTCCACAAAGGTAAAAGAGCAAGAGAAT
GGTCATATTGCGGGAAATTCTTTAGGTAGTAGATCTCCTGCTTTTAAGTTGCTTTCGCGT
TTGATGCTATGTTGAACTTCAAATATATTCAAGTTTGAACCCATAATTTCTAAAGTGTAGC
AAATTTAGTGGTAAGAACCTAAAAGCTGAACCCACCAAACTTAAATCCTGAATCCGCCTT
CGTATTTGATGTCTTAGACATTTGTATGCCTTCTAAGCGTAAATGTAGGTTGACAAGATG
AAACAGGGCAAATTTAACTTTTTTTCTCATTTCTGCTCTAATATCTACAGTTAAATTTCAG
TAACCTACATGCAACACAGGCATACTGCACAAAAAGTCAGGCTAAAAAATAAGAAGATG
CCGGCGTTTGTAAGAAAGTAAGAGGATTATTAGAAATGTTCTTGGTTATTTTCTCCGACA
GCCTTGGGCAAGAATAAAGCTCTAAATTTCACCGTCAAAGAGTTCTAATCAGGAACCAT
TTTAATACATTGAGGGGTTTTCTCTTAAGGAAAAATAATTTTCATAAAAGCCAAATGGTTA
AAGGTTAACAGCTGAGCCGAATTGCCTTAATACTCATAACTCTTAATGCTACCATATTAT
ATACCAACACCAACTCAAAAATTCACTTCCTAAAATTTTTCAACTTTTTCACAGGAAACTA
TTCCACTATGTGTATTATGCAATGTTAGATACTATTAACAAAGTTGCTTCATTGTTTTTTTT
CTCATTTAAAAAGCTTAAATTTGCAATGCAACAGTTCCACTATCCAGGCAATACACCTTT
ATTGACAGTATAATTTGTTGGCTTTTCTTGTTCGTAGTGTTCAAATGCTGTCTTACATACT
AACAAGTGTACCGTATATATGCCTCAAAAGCTAGTTGAGGACAAAAGAGAAACTTTCAA
CTTACTCTATCGGCAGCGGCTTGTAGAGTGACATGATCTCCCCACTCTCCCAACCTGGT
TAGAGCAAGAATATGTTGGTAATATATTGAGATTTCCCGCAATAAGAAGCACTGAAAATT
GACCAGACAGCTTACCTCTTCATTTTCCTCAAGTAGCTTTTGTATCTCATGGGCACATAA
CCTTCATATAACTTTCTAAAGCGCTTTAGCTGAAATGGATTGCCAACTAGGATAAGAAAC
GTGTAGGACATAAACTAGACATAGGCGTCAAACTCAAGCAAGTATAGGACTCTGTTGAT
GTTTAATAGATCCAGAAATTAGGTTAAGCAGTTGAGCTGATGAGTCTCAAGCAAACACC
GGGATATTTTATTTTTAGTACTCTATTATTATGCACAAGTTACTTTAGTTCTACTAAAACT
CACGAAAACGAATATAAACTGCAGGATTTGTTAATCTAGGATGAACACAATCCTCAAACA
TAATCATTATGTAATCTCAACTTTTCACCCATCCTGTTTCACAACCAAAGGCAAGAGATG
AGAAGCAAATATTGAAAAAATGCAAACAGACCTGTTTAACGACCTCCTTCCTTACATGCT
TATGATACTCTGGATTATGATACAACTGATCCGAAAGGGCCCGAAACTACAATAAGCCA
AGTAGACAGTCATATAGCAGGATTAATCACCTGTGAATTAATAAGTAGCAGGTGGGTCT
CAAGTTCAATGAGAGTTTGTCGACTAGTCAAAAGAGACCGACCTGGCAATTTCCATCTC
CTTCAATTTGCATTTCAGCAAGACCATATGTCGCTAACCTGAAACAAAGAAGTTACAAAT
AGGATCCGAGTTGCCAAAAGGCGAAAAACATAGAAAAGCACCAAGAAATTTCACCCTTT
AAGTGCTAAGTGCAATTAAAGCATGAATTAAGCTATATAGAAAGACACTAATGAAGAAAA
AGATAACCTATGAGCAGAAACTATAATAATTTGGACAAAGAATTGAAAAACTAAAATTAA
TCAATAAATATGAAGTAAAAATCATGTCAATTAAGTTCCATAATACTGGATTCACAAAATA
AGTCAACCAATGACCTCAAGCTGAACAACTATAGCATGCTCAGTAGTCAGTACAATGAT
GGATAACCTGCTAGAGAGCCTCCCATGGTCTAGTGTGGCATCATTTGGGTCAGGTATCT
CCCCAATTACCCGTGGAGTGTGCTGCAAGGATAATAAGACTATAAGTAGCATGTAGAGA
TAGTGCAACATGGGTTTTCATGGGTTAAAGCTCAAAAAGGAATATATAGAGAAGCAACC
TTTGGATACATACATGTGGTCACATTATACTCATTTAATTTGAAAGAGTTGCCCCCAAAA
ATGTAAATTTAGATAATTGTTCATAAAAAGGTCAAAAGTTCCCCGGATTTCTAAACTTCTT
GAACATTCTCCTTCTTCCTCTATGGATAGGGTGACGTGACGCGCAATGGATCAGTTAGA
AAGGAGAAGAAACTGATCAAGTGTCCCCTTCGCAACAACCTTTTTCCCTTTCTCGCATC
CTTGGTCAAGCTTGAGATTTTCTTCTATCTGGATTTAGTTACCCGAACCTATGCAAAGCA
AGCCTACACTCTAGCTGGGGCCAAGCCATCTTTGCCTAAGTTCCATTACCTCATTAACT
CGATAAAGCTGGCATTAAGAGAAGCTTGGTAGCATAAAGTGTCAAGGAGGTGGTTTTCG
CCTATCTATAAGGACAGTTGGAGTTGATGGTCCTGGTTTTGTTACAGTAAGGGATGTTG
CAGGAATCACTTGCATTGATGGAACAGAAGCTCTTCCTGCTCTTGTATTCGACGAAGAA
TAGGCCCAAGGGACATCAATGGACAATCGCCAAGCACATGGTTTAGCTAATTCAATAGC
CTTCGGAGAAAAGTGATAAGTACCATCGAACAAGCAAATCACTTCTGGATTATTAACCTT
TAAGGATCCACTTATGGTGAAATTTTGGAATGATGCGGGGATAACCCAAGGGAGTCAG
CTAAACAGAGACGGAAAATATCAGTACCATTCTGGTCGGCGTATGCTTGTTGAAGAGAA
CAAGCTCACTTCTAGCTAGCTAAAGGGAAAGAGAGATACTATAGAATACCTAAGTCAAT
TTATCATTGAGCTGCAAAGATCATAGCAGACACTACGAATTAATAGCAAATCTCGGCAC
AAACCTCTACATGTCAAGATAGTGAGTCCATCAGATCACAAAAGACTTAATACCAGATAC
CTTTCTAGATAAAGGGGTAAAATCACTTTCTTTCTTCCACAAGATCTCCATTTAAAGAGA
CTATCAACTGTACTTAAATGTAATCATATCAACTGTACTTAAATGTAATCATACCGGGATT
GAGTCCAAATGAGAAAGTCTCCTCCCAAGTTTATTGCCACCATATTTGAGAGCATTTTCT
TCTTCTTCAGCTAAAATTCTTGCAATGGTATGATCATCCTCAGTACCGTGTGAACTACTA
TTCAAACTAGATGTAGTAGAACTCGAGCTTGCTCTTGAATTTCCATAGGATTCATTCAT
SEQ 22
CTAGAAAGGGTAAATGAGACCTCCGAACTTCCCAGAAAATGCTTCCTTCTGAGGCTGTT
GCACTATAGTTGCATTGCTCATTCGCTGCATTTAAAACAAATTAACTGTGAAAACTACAG
TAGCAAAAGGTTAAAGAAAACGAACATGAATAGCACGTCAAGAGAAATTGGCTTTGCTT
TAACGGTTATTTCATCTCTGTCAACAATGAAATGGCAATGAGTGAACCTTTTCAGAATAA
GTTGGCTTATCTCATTAATGAGAGACAGATAACAAGAGATGTCTCCTCTAATCTCTAAAT
TGATATTTCATGTTGTATGGATCCTAATAGGATGAGAAATGCATCAAATACAGAAAGGAA
TGGCAGAAGTGGAGATATACCTTGAGGCAGAGGTTCCGACTTGTGTCACAAATAGGAT
AATCATGTGGGCAACAGTGGCGTCCATCTTTGCAACACACTGCAGAATCCAACCCACAA
CATTTCCAAGAAACGCAAACTCCAAGAAGCCTCCACCCACAGCAGCAGGTTTCACCTTG
ACCACATGAGGTAAACATACTGCATTTGCTTGGACCAGGAGATGGAGGAGATGGTGGA
TTTGGGCTACTCTTAGTTGGATATGAAGCTAGCTTATTGATCCCACATATCCCTTCTTGA
TTCCCACTATTACGCTGCATGTGCATATAACCATTTATTCCCCAGCTTGTTCCCCATGAA
TTTTTTATAATCCAGTAATCAACTCCATTTTCAGAACCATAGCCCACAATCAGTACCGCA
TGATCAAGTACTGTAGAACACGGTCCAGTGAATATCCCCTGCAACACAAAGATAGCACC
TTTATATTTCTCTCCGACAAACAATTTAACTGATTAGGAGATTGGTAATTTGGAGATGGA
AGATACCTTTGAATATGATTGAAATGCTCTCTCACTGCCGCATATCCCAACACTCACGG
GTTGATTTGCCACCGCCTTTAGAAGCTTGTCCTCATCATATTGGGGAACATCAGTATATC
CATCAATGGTTACAACACGTCTTTGTAGCTGCAAAGTCGACAAGTTAAGCCAAGCAATC
ATATGTTAACGTTGTTCATTATGTTTTATCTGGAATAAACTTGTCCTAGGTTCTCTATATT
AATTATGAAATCCAGAAGCAGGAGGGCATATATAGGACAAAAAAAGATTTAGTACAAGA
ATAGGAGCAAGAAGATGAGAGAACAATTATGTACCTTGTTTTTGTTGCATGTTCCTTCTC
TTTCATTAAAGGGGTAATCCTCTTCAGTGTCAATACCACCATTCTTTTTGACAAATTCAAA
AGCATAGTCCATCAATCCACCTCCACAGCCGTCATTGTAACTTTTGTCGCAATCAATTAA
CTCCTGCTCAGAGAGACTTACAAGAGATCCAGTGACAATCTTATTGATACCTTCGATTG
CTCCAGTGGCTGAGAATGACCAGCAAGCACCTGGGAAAATGAAACAGAAGTAACTGGT
TTTAGTTACAGAAGCTAGTTGCTGAGATTAAGTATATGGAATGACAATAGAATGACAGTG
TTGTGGACAAGGGCAAATTTGATTCATATTATCTCAGAACAAATTCACAAAAAGGCTAGA
TCTTCACTTCCGTCCTATATTCAGGCTGACATTACCAGACATATCTACAGAAAATAATTA
CTTGAGAAACATAAAGGCAGTGATAAATTTTAAGAATAAACTATACTTAGTGAGAATTGT
GTGCAGTCATAAAAGTAACAAGTCTAAGTCCCTGAAGCAAATTCTGCATTGGGAGGAAA
GTATATTTCCGCGTATATGACAGCCAAATTAGTTGCTATAAAACATCACACTAGTATGTG
ACTCAATATTGACAGTAAAATTATAAAACATGTTCCTTCGATTGCACAAGCAAGTAGAGA
ATCATAGGGTACAATTGTGTACACAGTTCCAAAAACAAGAAAGAAGAGCTAAAACAATG
AATTGTGAGTCAATGATTCAATGGTCGAAAACAGGACCAAGAAATGGATCAGTGGATAT
TTATATTTATTTCTATTTTTAAAACTTAAAGGGCATGATGTGAAGACTGAAGCTGGTAATC
CAGTTTTGATTGTGATGCACATGAATGGATGTGGAAAGTAATATTCTCTGGAAGACAGA
AGACCACTAACCACCTCAGTTGCTCAGACCAAGATAGTGAGTAGATCTCCCCTAATCTA
TTCAACAAAGTTCATTGGAAAGAAACAAACAATGAAATGGCGGATCTCCGAGCAGTCTG
GTGAAGTTTATGGTCCAGTGGTTAAAAAGAATGACAACTCAACCATATTTTACTCCTCCG
ATGTGCTCCGTTCATGATCTTTTTAATATTTCTCGCTAATCCGCTAATCAATAAAGAATGA
GATACTGTATCAGTATGTCCTATTATTGTTGTCTTCCAGTCACTCTGAAGAAATGATTTTC
ACATACATAGAGACAAAAATTGAAAGTAAGAAACAACAACAACAAACCAGTGGAATCAC
ATAAGTGGGGTCCGGGAGTATAATGTGTACGCAGACCTTAGAGGTTGTTTCTGATAGAC
CCTCGGCTCAAGAACAGTGAGAAAATTGAAAGTAAGAAACAAACAGTATATTCATTCCTA
ATCAACTCATGAAAGGACGAGCTCATGAGACTAAGTTTCAACAACAACAACCATATGATT
GTTTATTCCACTTCATCTTGATTCCAATACCTAATAATTTGTCTTTTGGGGCAACTCAAG
GGTTCCTAAAGCTAAGAATTCTCTAAATCTCACACTTCTCCTTATACAAACATTCAAATCC
TAACCAAACTGAAAGTGCTCCTGTCTAATACTGATGAACTAAAGTAAGTGCTGAGGCTA
GGTTTCAATGAAGTAAATTAGTCCTGAACTTCAACCTGTCAAATAATACAAGGAAAAGCA
AAAAAGGGTAGCTCCCAGACAAGAGAAAAAGGCAAAACTAACATCACAAGTTTCCATTG
TCATTTGAGAAAAAAATCATCAAAATCCAAACTTTGTAAAAATTTCTAATGTTGGCTCTAC
TATGCACAAGTTATATATCCTCCACATAAATGAAATCACTATAAAGATACAACTAAAAGAT
AACGCAATAAACTGAGCATACCACAACTGCCTTGATTCTTGACTTTAGTAACAGCTCCTT
TCTCTCTCCAATCCAAAGAAGAAGGAATATCAACAACACCAACATCATTAAAAACTCCAG
CAGAAGACGACCCAGTTTTCAATCTAATAAAATCATTAGCAGAAGAGGACAAACCCAAA
AAAGAGTTCTTGAATTCATGGTGAGTGAGATCAGAAAAGGCATTGAGATTAAGGGTATA
AGTGGAATTCCCCTTACTATTATGCTCTATAATATAAGCATAATTTTCTTCAAACACCTCG
AGTCTGTACACCCTTTCTTGTTCAGAAGAATATGTCTTTCCATTTTGCTGACACCAACTT
TCAAAAAGATCAGAAATTGATGAACAAGTGCAAATTGGTCCTTGAAAAATTAGAAGTACA
AGAACCAAAGATGGACATAACCAACTCAT
SEQ 23
TTAATGCTTATTCCAGAAACTCCACTTCTTCTTCTTCTTCTTAAAGTCAAATGGCAGGAA
GTCTGGAATGGAGCATCAAACTACAGTATTAGAATAATATGATAAGGGTAGTGTGTACG
CCGGTGGCGGACCCAGGATTTTGTGCAAGCGGGTTCAATCTTAGAAGTATATAACTTTA
GTTGTAAAATAGTAGTTGTCAAGTGGGTTCAAATAAAATATTTAAACAAAATTTACGCAG
CTTTAATCCTAATTTATACATATATACAGTATTAGTTTTTGATGCTTGCCACCACGTGCGT
CCACCACTGTGTACACATACCCCTTACCCCCTACCTTGTGAGGATAGAAATCTAAATGA
AGCAAGAGCAGCAAACTTCCGGTCAACTCTCAATGTTCATCGCTTTGTCCATAAGCATG
TGATAAACAAAAAGTGTTATTCCGTAATGCCCATGGTAACCCCCCCCCCCCGGGGGGG
GNGGTTTAAACATGTAATTAATCAGATATAGGCCAATTAATAATAGTTGAGCGACCATGC
TAAAACCACGGAACTCCGGAGTACCTAACCCCCCCCCCCCGGGGGGGGGATGTCCAT
GCTAAGACAAACTAAACAGAAACGGGACATAAAAGTACAAGCAACTACCTCCTTGAGGA
TAGATTGAGTTGTAGTGCACCTCTGCCCAGAAACTCAAGTATATGACTGCAAGAAGAGA
AAAATAAGAGAAACAATTAAATTGGTGTGAGCGAATGAATATCAAGACTTCAAAACACCG
CTCTTACAAAGTGCACATGCACAAAGAAATTGCATTCATACTTTAATTTCTCTTCCAAGC
AATCTCAAGATTTGCTTGCCCACACTTGGCTTCATAGTATAGGTATGATACAATGGCATA
GAATAAATGACATGCATACATAACCAATATAAAGCTTGCCCCCATTCATTAAACTTACAA
CCGTCTCATAATCATTCAATATGTTAAAACAGACAAATTCCGGTCTCTAAAAGGAGAATG
TGAATGTCAAAGCATCCATGTTATGAGATGGAATTTAGATTTCAAAAGAGCTAAAACGGA
CGACTCTTCAAAAATCAAAATCTCCTTCTCATGAAACGCAAAATCGAATTTGCTTAAGAT
TGTCCTTAAGGGTTCATAGTCATCCATTCATCCCTCCTTCCCCTTGCGCAATTTTTTGGT
CAAGGCAGGCCGAGGTACTAACTTTACAGTCCAAAGATCAAAAGTACTATTTGCATTCT
TCACGACTCATGTAATAAACTTATGTTGTCTCTTTAACTCCAGTGGTCCTACTTTATCAG
AGTCGTTATCTGATTTTGGACTTCTGAAAAAGTTTGATACAAAGATCGTACTAACTTTTC
CATAGTTGGCACAAATTTCAAGAATCAAATTCATCCAGTAAATCAGGTTGCTCTGGTACC
AGCTACTTCTATAATTTAATTTACTACTATTACTACAATATGCATAATCAAATTATCTGCTT
CATCTCCATGTGTAGCCTGTGTCGTCTGAAACGCCAATGGGGGAGTACTAATTTGGTG
GTTACGAATTATCATACTATCTCCCCTTTTTGAATTGTTGAATTTGGTCCTGAAAAATGTT
GCGGTTTTGGCTAAAAGTCTAAAACTGCATTGCAGAAAGTATCAATAGAACGACATAAG
AACTCGATAATGGTTTCTCAGTTAGTGGAATTACAGCTGAGGAAAGCATCTTTAACCGC
AAACTGGAAATACGTACAGCATTAAGCGACTCGTGACTTTTTATTTGAGACACATGGAAA
TTGAGAAATAGGATCTATGTCACTCCCACTTCCAAATATTTTTGTAATAAAAACTTGTTCA
ATCGCATTTTGTGAAGTAGAGGATATTACAGAAAGGTAAAAGCAATTCAAAGTTTGAGAA
CTAGCCTACCTCTGTTTGACTTCTGATTCTTCGGAAGAATCTCGATGTAACATGTATCCT
TGAATGACGTTATAACAAGAATTTTCACACCATACTGCCCACAAGACAAAAAGACAAAAT
CAATGTGCAACACAAGTAGGTTCATTCACAAACCAATGCATCCTAGTCTAGCATCATCA
CAAATAAAATCTTCATAAAAGGAGCTGCGCATATACAATAAATAAAAAATGCATCATAAC
CACTCAAAATGGAGAGTGAAAGAAAGAAATAGCAAAATAGAGGCACATGAATTAACAAA
AGCTAGTAAAGCACCCAATGGAGGCACTATACCAGGACATCCAAATTATGGTCTGGCCA
ACAATAGCTTAAGCTTCTTATATTCCAAGGTTAAAAAGTAAACCAAAGTAATCAAATGGA
GAGAAAAAACCAAGGAAGCAAATAAGGGGAATAATCAATACCGAGTCAGCAGCAGCCT
GCAACGTAACATGATCGCCCCATTCCCCACTCCTGGTTCAACCAATATATAAGCAGATG
TTGATTTAAAGGAGAAAAGATAATGCAGAATTTCAAAATGGAGAAACAAAGGTCTGAGA
ATTACTTGGACATCCTCGTCAAGTACTCTCCATACTCCATTGGGACATATCCCTCATACA
TCTCCGGATGATGTTGAAACTGACAAGACAAAATGATTTTAAAAAACATACTCAGCTAAA
ATGTATGTGAAATAATTCAAAAATGAAATCGAAATATCATAAAGAAGATTATCTTATTCAC
TTAGACAAGCACCTGGCTGACTACTTGCTGTCTGACAAATTTGTGGTGCTCTGGTGTAC
GATAGAATTGATCTGATAAAGCACGGAACTGGAACAAAAGAGGACATGTGAATAGATGT
GCATTAGAAAGAAATAGGATGGAACCTTATTTCAACAAACTTAGAATCGGAGGCGAAGC
CTAATCCACTTGGGAAAAATAGGCAAAGTTCCCATACCCCATAAAACTAAAGAGTTGAG
AAAAAAATTGAATTATCCTTTTGTCAAACTACTAAAAATCCACAAATATTTTTAATAAAGTT
GGAATGGCAAGCAGCCTGACAATACGTCACTTGAGTTTCATATTCCAATTTTTTTAAAAA
TCCTATTATGAACCACTTCATTCACCATTTCACTGTCACAAACACCAACAACAAGTTTCT
ATCAGAGCCAAAGAGTTAATTCCAAAGTAAGGAATACTGATAAACCGTCATCAAACATTA
TGTTTTTTGTTTTTCATTCCCTTTCTTCTTTGAACCAGAGAGTAAGACCTCCATACCACCT
AGCACCTTGATATACTGAGATTTTTCATGAGACAAACTTAAAGAATTGGGGATCCTTCTT
TTGTTTATGGTTAAAAATTATGCTACAAGTAGTTTAAGGAAAGGGAAAACAATTTTTTTCT
TTCACTAGAAATCAAATCATGAGCGTCTCTAGACAGTTTGATATCATTACTGCAAGACAA
ATCAACCAAGTAATACAGTAACCTGGCAGTTGCCATCTCCTTGCACTTTGTGCTCCACC
AAGTCAAATAATTGCAATCTGAAGCAAGAAAAACCATAGCATGGGATCCTTAGCAAAGA
ATAACTTGCAGCAATAATATTACCATTCAATTGCATTGGCAAAAATATCAACTTCACAGG
AAACTTAGGTGGCACAAAACCTAATAAAAAACACAACAATATCAACTTCATAGGAAGCTT
AGGTGGCACAAAATCTAATAAAGAAACACAACAAAAGAAAATAAAATGAAAAACCACATG
CATTGTCCTGTGACTTTAAGAAAACAAAGGGTTAATAGTATCTATTGGAATGTGCTTCAT
AAGTGTTTATTTACAAAGCACAAAATACTAGTTGGCTCATTCCACACCAATTATTTTCTGT
GCTTGTCTCGGCTCCCATCTCTCCCATTTGATTCTCGTTTTCTCAAAATGCTTGAGGGGT
CAGATGTTACTTTTCGAATAGCAGGCAGTAAGAACCACCAGTAAAAGAATGAGTTAATA
AAGAAAGAGAAAACCTAACAAAATAAAAATAAAGAAATGTTTCTGGAGACACAGGACCC
CTATCACAATAGAGGTATGCATTTCTCACAGTGAAGCTATATTTCATTACCTTGAAAAGT
GCTCAGAATTTGGAGAGAATTAAGCAAAGCACTATCATAAGATCATATGTCATTAACTTG
TTCATACACAATTTTTATCTACTTGAAAACCTAAGTCGGAGGGATCAGGAGATACCTATT
TAGCAGCCTTTGATGATCAGAAGTTGCTTCATCGACTGAAGGTATGTCCCCATTTATTCT
AGGAACATGCTGCATGGTTAATAACACAAATTGTTATAAGAAACTAAAGCAGCCTCAAG
AAAATGGCCATAGGTGCAAAGCACCACACATGTCCTCGTACACAAAGTGAATTAGTGTT
CTCAATATACTAACAGACACTACACTTACAGGAACAGCACTCAGCTGGTTTATTCTCTTC
CCTACTTCTCCATCAAGCTCAAATTCATCTTGTATTTCCAATGTGTAGGTATACTCTTCTC
CATCGTATGATCTGTCTCCAGGACTCGAACAAGAACTTGAAGGCCCTACATCATCAGCT
TCTAGGCTGGTGTCATGCCCTGTGAATCATATATAATTAGCAAATGTTTAAACTCAAGGA
ACATCACAGAATTGAAAACAAGAAATGTACCAGCATAATACTCTCTTGGAGGAGTATGC
CAATGTTGTACACCAGTGGAGGCTTGCAAATACTGCTCGTCTGCATGTGAAGATTCAGC
ATCTTCTGCGATGGACAACTCTGACAAATCTTCTTGTAGAACATGAGCAATAGCCTCATC
ATTGTCAACATTGCAATATGATGTGTGATAGTGGTTTTCTCTGGCATATTGTTCATGACA
TATCTCAACGTCATGCTTTCTACCATCACCGTAATAGTTGGAACTAAAAAGTTGGTCCAC
ATCGAGAAAACTAAGAACGCCACGAGCAGCTTCAGATTCCGGCTCACACAT
SEQ 24
ATGCCTTCACTTCTTCAAATTTTCCTTCCTTTGTTTCCATTCTTTTTCTTGGTTTCTTTCTC
AGTTTCTCACGGACCCTTTTTGCCAAAGGCCATTATTCTTCCTGTAAACAAAGATCTGTC
AACTTTTCAGTATGTTACTCAAGTTTACATGGGTGCTCATCTTGTTCCTACCAATTTAGTT
GTAGATCTTGGAGGTTCATTTCTCTGGACTAATTGTGGCTTAACTTCTGTATCTTCAAGT
CAGAAACTTGTCCCCTGTAATTCACTCAAATGCTCAATGGCTAAACCTAATGGTTGCACT
AACAAGATTTGTGGTGTACAATCAGAAAATCCTTTTACAAAAGTGGCTGCAACAGGGGA
ATTAGCAGAGGACATGTTTGCTGTGGAATTCATAGATGAGTTAAAAACAGGTTCAATTG
CTTCAATACATGAATTCTTGTTTTCTTGTGCATCAACTACTTTGTTGCAAGGTCTTGCTAG
AGGTGCCAAAGGAATGTTAGGACTTGGAAATTCAAGAATTGCATTGCCATCTCAGTTGT
CTGATACATTTGGTTTCCAGAGGAAATTTGCTCTCTGTTTGTCTTCTTCAAATGGTGCTA
TAATATCTGGTGAAAGTCCTTACTTGTCACTTTTGGGTCATGATGTTTCAAGATCTATGC
TTTATACACCTTTGATTTCATCTAAAGATGGTGTTTCAGAAGAGTATTATATCAACGTTAA
ATCCATCAAAATTAATGGCAAGAAACTGTCGTTAAACACATCTTTGTTTGCAATGGATGA
AGGTGTTGGAGGGACAAAGATTAGTACAATTCCCCCTTTTACCACCATGAAAAGCTCAA
TTTATAAGTCATTTATTGAAGCTTATGAGAAATTTGCTATTTCCATGGAATTGAATAAAGT
GGAAGCTATAGCACCATTTGAGCTTTGCTTTAGCACAAAGGGGATAGATGTCACAAAAG
TGGGGCCAAATGTGCCAACTACGGATCTTGTGTTGCAAAGTGAAATGGTTAAGTGGAG
GATTTATGGGAGAAATTCAATGGTGAAAGTAAGTGATGAAGTGATGTGTTTGGGATTCT
TGAATGGAGGGGTGAATCAAAAGGCTTCAATTGTTATAGGGGGTTACCAGTTGGAGGA
TAATCTTTTGGAGTTTAACTTGGGAACTTCTATGCTTGGATTTACTTCTTCACTTTCAATG
GCAGAAACAAGCTGTTCTGACTTTATGTTCCATTCTGTATCAAAAGATTCAGCTTTTGAT
TCT
SEQ 25
TTAAGAAGAATGAGAAGTAAACTTATTTGTTGAATTTAAGAGGTAAGAATATGCAAAAGT
AGCATGAATTGCAGCACCAATTGGAAGGACATCCTCATCAATGATGAAATGTGGATTGT
GTGGAGGGTAAATAGCACCAATCTTTTCATTTTTTGTTCCCAAAAGGAAGAAGGAACCA
GGAACTTTCTCTAAAAACACTGCAAAATCTTCACTTCCCATGAAGCTAGGTGCTATTTTG
AAACTCTCTTCCCCAACAATCATTTTTGAAACTTTTCGGGCATGTTCGTATATTCTCTCAT
CGTTTATTGTTGGAGGAAGTGTTGGATTTTCTCGACCATCAAAGTCAATCTCGACCGTA
CATCGATGTACTGCTGCTTGTGCTCGTATCACCTGAAAATTTTACCAATAAAAAGTTTAA
TTACCAAATATTGAATATAATAATATGTTCTAAAAATAACATGGATGTCTATTCCTAATTAT
TAGCAAGTTATTTCATTCTCCCTAGTTGATTAGTGAATTACTGAAAGGTTATGGCGTTCT
GATATTGTTAAATGTACCACTTATTTTATTGAAAAGTTATATTGCATCTCTAAAGAACTGA
AAAGTCATTTGACCTCTTGGCTCGTGACCCTTCTCAAAAAACAGTTCTTTGGCTATAAAT
AAGATTATTTTGTGTTGAATGAATATATCAAGCAACTTGAAAATATTAAAACCTCTTTCCC
GAAACAAATCCTACAATTTCCTCAAGTACTCGTCTTTTCAAACAAAGTATTAATGAAAAA
GAAACGTAACTTGTTTGAATAAATAAAATTTGCACATATAAACTTTGTAAAGAGACGTGT
GGGACTTTGAATATTGGTCAAAGTATCCAAGATTTTTGTTCTAAATTACAAGTAGTTTAC
CTCTTCAATTCTTTTCCTCAAACCGTAGAAACTCTTCTTACTGAATGCTCTATAGGTCCC
GGAAATTGTAGCTAATTCTGGTATGATATTAAATGCATGCCCCCCTTCAATCATGGCAAC
AGAAACTACCTGAAATTTCAAAAACTAAATATATAAGAATTGATAAAATAAAAATTTAAAA
TTTGTTTGAATAAGTTTGGAAAAGAAAATTGTTAATCTCTATGTTTCAAAAAGATTGTTCT
AGTTTGACTTGACACAAATTTTAATAAGGAAGAAAAGACTTTGAGATATGTGGTCCTAAA
TAAACCATATCATTTGTGTGACTGTAAAACTTTTGAAACTTGTGATCTTAAACTTACTATA
ACATTTGTGTAACTATAAATGCTTCTAATAAAAAAAATATTAAAATTTGTCAATTTTTTTGA
AACAGACCAATAAATAAATAGTGTCAATGCTTTTGAAACGGAGGTAGTACCTGGGATTC
AAGAGGATCAGTCTCTCTAGAGACAATACTTTGCAAACTAATAACAGAAGTAGAAGCAG
CCAAAATTGGATCAACAGAATCGTGTGGAACAGCAGCATGACCTCCTTTTCCTCTAATT
GTAGCTTTAAAGCTTCCACATCCAGCCAAGAATTCACCAGGCCTAGATGCAACTACTCC
ACTTTCATACTTATGAACTAAGTGCATTCCAAAAATGGCTTCCACATTTTCAAGAACTCC
TTCTTCTATCATATCTTTAGCCCCATGCCCTCGTTCTTCAGCTGGTTGAAAAATTAACAC
CACTGTTCCCTGCAATATTATTATACACGGTAATTAAATTCATTACTTCAACTAATCCATT
AGCTTAGAAGTATGTATTTAGAGCTTAATTAAGGGTTTTATTTAACCTGTAAATTGTGTCG
GAGTTGTTGTAATATCTTGGCAGCACCAAGAAGCATGGCAGTATGGGCATCATGAGCA
CAAGCATGCATTTTTCCATCAACTTTGCTCTTGTGCTCCCATTTCGCCAATTCCTACATT
AGAAGAATTCAACTTTGACTCACGACTCTTTTATTGATCAAATTATTCACTTTATAGATTT
TTGAAGAATTGATTAATCGAGAATAAATATAGAGTCCTACTGTAGAGGCATATTATATGA
TATTGACCTCTACAACTTATAAAACCCGACTTATGATCTTTATTTTCTTTTTCTGTTGTTTA
GATCACAATTGATATTTGATGTTCAAATTAAATGTTTTAGCGGTGTAATATTATTACTTAT
GGTACTTTCGGCCATCCTATCCAATTTTACTACTAGGAAAATAAAAAACGTGTTGACCCT
TTATTCCACAACATATGAAACTAAAAGTAAAAAGAGATGGTCACCATAGAAGAAAACTAG
CTAAAGTATATACCTACGAATTGAAGTGTTTTCTCTTTCCCAATGAAGTTCCAAAATTCAA
GAATCTCTTTGTTTTAGGTATAATTAAGCTGTTTCGAACTCTATACTTAATTCAATATTAA
GAGAGATCTGATTTATTACTTTCCTTTCATGGCTTAAATATTACCGCCGCCGCCGCCATT
TCTGACAAAAACGGAAAGTAAACTGCCGCAAGTAATTTCTTCTTCTGCCATAGTTAATTT
AGTCGCCCACAAAATTAATAAAATGACTCAAATTTACTGCCTACACCCTAGTTCCGACCG
AATACAACATATAAATGATCCCCGTGCTGTTGTCATCTCGAACATCCTTAATAACAATCT
CCAAAACCATTAATGAAATACAGACAAAGGTAAGAAGTAAATTTGAAGATATATAGTACT
ATATTAGGCCTATAGATCTACCTCCTAAACTCCACAAACTGTTTAAAGTGAATAAAACAT
TTAAAGAGTTCATATCAATTTTTTTTGATATGAAGAGTTATCCGTGGTTATAAATGAACTA
AACGTGATACTAGTATAAATATTCTTACCGTTTTTTGTTTTGAATATAATTGCAGGGTTGA
GAAAATTTCCAAGCAGAGACTACTAACCTGAATAGGCAAAGCATCCATGTCTGCTCTGA
GAGCCACAAATGGCGGCTTACCGGAGCCGATGGTGGCAACAACTCCGGTCTTAGCCA
CCGGCCACCGGTACTTTACTCCCATCCGATCAAGCTCCTCTCTGATCAAACCACTCGTC
TTAAATTCTTCATAAGCAAGTTCTGGGTTCTCGTGAATTTGTCTCCTTATTTTCATCATCC
ACTTCACTGTCTCCGTAGCATTTGCTAATTTTGTAATATAATCTTTCACGTAACAGTTTTG
ATCTACCAAAAACGGATTCAAGCACTCATCATCGCCGTGACACGAAGGAAAAACAATGA
ACATACATACAAGCACCAAAATTAGAACTTCCTTAGCACCCAT
SEQ 26
ATGAAACTGAATCCTTACTCATGGACAAAGGTAAGTACTTGATTGTGAATTATAACTGTA
TTATGTACATAAGGTCGCTGCACAACACAAAATGTTGAAAATAAGATGGAATTATTAGGT
GGCAAGCATTATTTTCTTAGACTTACCAGTAGGCACTGGATTTTCCTATGCAAGAACTCC
AACAGCTTTACAGTCATCTGATTTACAAGCAAGTGATCAAGCATATGAGTTCCTTTACAA
GGTAATTAGATTCTTCACGAAATTATTAGTTAAATGTATTTTCTCCTTTGCCCCTCAATGT
TGTTCAATATGTAGTAGAACAGTCAATAATTTTATGTTGTTTGCAGTGGTTCCTTGATCA
CCCAGAATTCTTAAAGAATCCATTGTATGTTGGCGGCGACTCATATTCAGGGATGGTTG
TTCCCATCATTACTCAAATTATAGCAACTAGTAAGACTATATTTTCCCTCAAATAGTTGTG
AAACAAGTAATGGCAGCCTAAGGTAGTAAGGTGTTCTGTTCTTGTACTATAACATTTTGT
GGCCTTGTGATAATGCAGAAAATGAGATGGGAATAAAACCTTTTGTGGATCTTCAGGTT
TGTCATTTTTCTTGTATATATTCTCTTTTCCCTACGGATAAGCAGACGGATTACATACCAA
CTCAGAATTTGTAACGAAATTGTTATGAGAATGTCACGACCCAAGCCCATAGCATGTATT
GTCTGCTTTGGGCCTAGGCTCGCACGGATTTGTCTTTCGGGCTACGCCACCTCGAGCC
CCAAAAGCGCGTGCACCATGTGAACTTGTGTCATACCTTATAAAGTTCATCACTTTCCTC
TATTATTCCGATATGGGGATTCGTCTAAGGTGACATGTGCACCGCTTATTCAGAAGTTT
GGCAGCCTAGAAGCTAGTCAGTCCTACTTAACTTGCCCTCATCAGCCCCCTCCTTCATG
GGCATCACACAGAATCAAAAGTCACTGTAGAATGTGAGTTGATTTGCAAAATGTATGAC
CTGATATCTCTCGTCAAGTGGTTTCAGGGATATTTACTCGGAAATCCATCGACTTTTAAA
GGTGAAAAGAATTATGAGATTCCATTTGCTTATGGAATGGGACTTATTTCTGATGAACTC
TATGAGGTTGGTTTTCCTTTGGTGTTATATAGTACAGTCAAACCTTTCTATAATAGCTACA
TTTGTTCCGATATTTTTTGGATGCTATAATGAAGTGTTGTTATAGAGGATATATATTAGTA
TAACATAACATACAAAATCGGCTCCGAGAAAAACTTGGCTTTATAGTAAATGACTATTAT
ATATGGATGCTGTTATACAGAGGTTTGACCGTAAGATCTTAAATATCCTCCAGTTATGCG
CTTTAATTTAGTTTGCTTACATTGTCCTTAGAACTAATTGATTTCCCTTTCTCAAATAGTC
CTTGACGAGAAATTGTAAAGGAGAGTATCAAAACACTGATCCAAGCAATACACAATGTTT
GCAAGATGTTCATACTTTTCAAGAGGTTGGATCCTATTTTGAGGAAAATCAAATATCATC
TGTTTGTTTTATGATAGGTTCATTAACATACTGACCTTATGCAGCTTCTGAAAAGAATTAA
TAATCCCCATATTCTGGAGCCCAAATGTCAGTTTGCTTCACCAAAGCCACACCTATTGTT
TGGCCAAAGAAGATCTCTTAATGTGAAGTTTCATCAACTTAACAATCCTCAACAACTCCC
TGCGCTAAAGTGTCGCGTGGGTACTCATCAACAAACTCTAGCATTCTTTATGCTATTGAT
TTTTTGTTTCACTGAGATACTTACGAGAATTTACAACTTGCAATTGATTTAGAATGATTGG
TACAAACTTTCTTCTCATTGGGCTGATGATGGCCAAGTTAGAGAGGCCCTCCATATCCG
AAAGGTACGTTAGTTCTTGTTGGAAGGGGAACCTTGGAGCAACGGTAAAAATATCTCTG
TGTGATCTATAGAGCACGGATTTGAGCCATGAAAGCAGTAATGCTTGCATTATGATAGG
CTGTCTATATCACACCCTTGAGATGCGGCCACCTTGCATGAATGCGTGATACTTTGTGC
ATCATGCTGCCTTTTTTTTTGAAGAACAACAAAATTTAACAAAGTGTGCTACACAAAACTA
AAAATATGATCAATTTGATTACAGGGAACTATTGGAAAATGGGTGAGATGTGCAAGTTTG
CAATACCAAAAGACAATCATGAGTAGCATACCATATCATGCAAACCTCAGTGCTAAAGG
TTACAGATCTCTTATATACAGGTTGAGTAAGATTGTTGTGTTTGCAAGATTGGAATAACT
ACATAAATAGTTGAAGATTATTATCTCTGTGAAACTATTTACTTAGTTTTCTATGTTTTTTG
AATTAAGCAGTGGAGATCATGACAAGGTTGTTACCTTCCTATCAACTCAAGCATGGATA
AAATCTCTTAACTACTCCATTGTTGATGATTGGCGACCGTGGATCGTTGACAATCAAGTT
GCCGGGTTAGTTTATGATGAAAACATTGTACGCTAGTCATAAGCTCTGTCAAGGTATAG
AAGTTAAACTCATTTTTTGTCTTTTGCATGATTGTAGTTACACGAGAAGTTACTCAAATCG
GATGACATTTGCCACAGTAAAGGCAAGATATCTCTTTCACTTGCTTTTCTCAGTTAAGTT
TGAAGATAAAAAATTTTGTTAAATAGTTGGTGTTTAAATTGCACTATTTTGTTACAGGGAG
CAGGGCATACTGCACCAGAGTATAAGCCTCGTGAATGTCTGGCCATGCTCAAAAGGTT
GATGTCTTACAAGCCTTTG
SEQ 27
ATGTGTGAACCGGAGTCTGAAGCAACTCGTGGGGTTCTTAGTTTTCTCGATGTGGACCA
ACTTTTCAGTTCCAACTATTACGGCGATGGTAGAAAGCATGACGTTGAGATATGTCATG
AACAATATGCCAGAGAAAACCAGTATCACACATCATATTGCAATGTTGACAGTGATGAG
GCTATTGCTCATCTTTTACAAGAAGAATTGTCAGAGTTGTCCATCGCAGAAGATGCTGA
ATCTTCACATGCAGATGAGCAGTATTTTCAAGCCTCCACTGGTGTACAACATTGGCATA
CTCCTCCAAGGGAGTACTATGCCGGTACATTTCTTGTTTTCAGTTTTGTGATTTTTCCTC
GAGTTTAAACATTTGCTAATTTATATATGATTCACAGGGCATGACACTGGTCTAGAAGCT
GATGATGTGGGGCCTTCAAGTTCTTGTTCTAGTCCTGGCGACAGATCATACGATGGAGA
AGAGTATACCTACACATTGGAAATACAAGATGAATTTGAGCTTGATGGAGAAGTAGGGA
AGAGAATAAACCAGCTGAGTGCTGTTCCTGTAAGTGTAGTGTCTGTTAGTATATCAAGA
ACACTAATTCACTTTGTGTACGAGGACATGTGCGGCGCTCTGCAACTTTGGCCATTTTC
TTGTCACTGCTTTAGTTTCTTATAACAATTTGTGTTATTAACCGTGCAGCATGTTCCTAGA
ATAAATGGAGACATACCTTCAGTCGATGAAGCAACTTCTGATCATCAAAGGCTGCTAGA
TAGGTATCTCCTGATCCCTCCGACTTAGGTTTTCAAGTTGACAGAAATTTTGTGTATGAA
CAAGTTAATGACATATGATCTTATGGTAGTGCTTTGCTTAATTCTCTCTCAGATTAGCAC
TTTCCAAGGTAATGAAATATAAGTTCACTGCGAGAAATGCATACCTCTATTGTGATTAGG
TGTCCTGTGTCTCCAGAATCATTTCTGTATTTTTTTTAGGTTTTCTCTTTCTTTATTAATTC
ATTCTTTTCCCGGTGGTTCTTACTGCCTGCTATTTGAAAAGTAACATCAAACCCCTCATG
CATTTTGAGAAAAGAGAATCAAATGGGAGAGATGGGACCCGGGACAAGCACAGAAAAT
AATTGTTGTGGAATGAGCCAACTAGTATGTTGTGCTTTCTAAATAAACACTTACGAAGCA
CATTCCAGTAGATACTGTTAACCCTTTGTTTGCTTAAAGTCACAGGACAATGCATGCGGT
TTTTCATTTTGTTCTGTTTTTTTATTAGGTTTTGTGCCACCTAAGTTTCCTAGGAAGTTGA
TATTGTTGTGTTTTTTCATTAGGTTTTGTGCCACCTAGTTTCCTATGAAGTTGATATTTTT
GCTAATTCATTTGAATGGTAATACTATTGCTATAATAACTTATTTTCTGCTAAGCATCCCA
TGCTGTGATTTTTCTTGCTTCAGATTGCAATTATTTGACTTGGTGGAGCACAAAGTGCAA
GGAGATGGCAACTGTCAGGTTATCATATTACCTGGTTGATTTATCTTGCAGTAATGATAT
CAAACTGTCTAGATGCGCTCATGATTTGATTTCTAGTGGAAGAAAAAAACTGTATTCCCT
TTCCTTAAACTACTTACAGCATAAGTATTAATCTTAAACATAATGTTTATCAGTATTCCTT
CCTTTTGGAATTGTTCTGGTAGAAACTTGTTCTTGGTGTTTGTGACAATGTCTTAGCTTT
CTTTATTACTTTTTAGTTATGCTTGAAAACAGTGGAAACAGTAAAGTTATCTCCATATAAA
GTTGTCTCTGTGTGACATATAGGTCATGAGTTTGAGCCGTGGAAGCAGCCATTAATGCT
TGCATTAGGTTAGGCTATCTATATCACACCCCTTGGGTGAGGCTCTTCTCGGGACCCTG
CGTGAATGTGGTCGGGACCCTGCGTGAATGTGGGATGCTTTGTGCACTGGGCTGCCAT
TTTAGTTATGCTTGAAATTCTCAACTTTTTAATTTTCATATTTGGTTTTTACTTGTCTATTC
TTTCCATTAGCCTTAAGCAGTTGCTCACTGTTCATCATATTTCATTTAAGTTTGTGAAGTG
TGTGAGACCATATACAATATTGCTGAATTATGATATACATTGGGGATTGGCAATTTCATT
TAAATTGAATTCTTTAGTGATTAGTTCAATAAAGTCACAAAAAGAAAATCGGACTTGAATT
ATTGATTTGGGAGTTATTTAATTATGAAATGAATACTAGTAAGAAGCGAGTCAAGAAATT
TGAGACTGAATGTGAAAATTGGATGGAAGATGTTCACGGAGAAAAGCTGATTAATAGTA
ATGTTGGTAAAATAGGAAGGGATTAGAACTCGGATAATGAATGTAGAGCGAACTACAAA
ATATAAGAAGTTGAGAGTTCGGATGGAGTTGGGGGGATGGGTGGTGAATGGAAGTGGT
TCATAATAGGATTTTGGAGAAAAACTGGAATATGAAAACTCAAGTGATATATCGGCAGGT
TGCTTGCCATGCCAAGTGCCAACTTTATGAAAATTATTTGTGGATTTTCAGTTAGTTTGA
CAAAAGGACAATTCAAATTTTTTCTTAACTCTTTAGTATTATGGGGGTATGGGAACTTAG
CCCGTTTTTCCTTTCTGTGAATTAGGTTTCACCTCCGATTCTAAGTTTGTTGAGATAAGG
TTCCATCCTATCTCTTTCTAATGCACATCTATTCACCTGTCTTCTTTTGTTCCAGTTCCGT
GCTTTATCAGATCAATTCTATCGTACACCGGAGCACCACAAATTTGTCAGACAGCAAGT
AGTCAGTCAGGTGCTTGTCTAAGTGAATAAGATTATCTTCTCTATGATATTTCGGTTTTC
ATTTTTGAATTATTTCACATACATTTTAGCTGAGTAGGTTTTTTAAAATCATTTTGTTTTGT
CAGCTTAAACATCATCCAGAGATGTATGAGGGATATGTCCCAATGGAATATGGAGAGTA
CTTGAAGAGGATGTCCAAGTAATTCTCAGACCTTTGTTTTTCCATTTTGAAATCGTGCAT
TACCTTCTCTCCTTTAATTTACATCTGACTTTTATATTGGTTGAACCAGGAGTGGGGAAT
GGGGCGATCATGTTACGTTGCAGGCTGCTGCTGACTCGGTACTGATTATTGCCCTTACT
TTGGTTCCTTGGTTTTTCTCTCCATTTGATTACTGCCTTTTGGTTTGTTTCTTAACCTTGG
AAATAAGAACCGTAAGCTATTGTTGGCCAAACCATAACTTGGATGTCCTCATATGGTGC
CTTCTTTGGATATTGTAGTAGCTTGTTAATTGCAAGTTGATGGTATGTAGGAAGTAACAT
GCTTCTATAGAATTTGTGATCCTGTAGTTTTTCATGAGTATGTGTTAATCCTTTATTTTGT
AGTGTGGAAGAAAATGTGTGTTTATGTGCCTCTCTTGCTATTTTTTTCTTTCAGTCTCCAT
TGTGTGGTCGTGTTGCATTTTTTATTGTATATGCTTAGCTCCTTTACGAAGATTTTGCTTG
TGATAATATTAGATGAGGATGGATTGGTTTGTGAATGACCTATTTGTGCTGCACATTGAA
TTGTCTTTTTGTCTTGTGAGCAGTATGGTGTGAAAATTCTCGTTATAACGTCATTCAAGG
ATACATGTTACATCGAGATTCTTCCGAAGAATCAAAAGTCAAACAGAGGTAACTAGTTCT
CAAATTTTGAATTGCTTTTACCTTTCTGTAATATCCTCTACTTCATAGAATGTGATTGAAC
AAGTTTTCATTAACAAAATATTTGGAAGTGGTAGTGGCATGAATTCTCAATTTCCATGTAT
CTCATATACAAATACATGTGTCACCGAATTGTGTACGTACTTCCAGTTCGCAGTTAAGGA
TTTTCCCCAACTTTAATTCCACTATGTGAGCAACCCTTACAAAGTTCTTCAAACATTCTTT
ATTGGTTATTTCTGAAATGTGGTTTTAGACTTATAGATAATACCAGAATATTATCCAGGG
CCAAATTTCAACAATTCAAACAAGGAAAGATAGTATGATCATTCTTAACACCACTGTAGT
TACCCCCCATTGAATTTTCCGATAACGAGGGCTACACATGGAGATGAAGGAGATGATCT
GATTATGCATATTGTAGTAATAGTAGTAGATAAATTTATAAAAGTAGCTAATACTAGATAA
CCCGATTTATTATCTGAGTTTGATTCTTGAAACTTGTTCGAGTTATGGAGAAACTAGTAT
GGCCTTTGTATAGGACCTTTCCGAAAGTCCCAGATCCGATAACGATCTGATAAAGTAGG
ACCACTGGAGTTATGAGACAACATTAGTCTATAATATAAATGATCAGAATATTGCAACAG
AAAACATCAGTTGTCTCTTTCCTCTCTTCGATAGAGGCAAAGGAGATTGAATCTAATTGA
TTCCGAAATGCTTCATTGGATATTCAATAGTTAAATCGAACTATTCATCTTGCAACTCTGA
AAACAGACGTGCTATACATGCAGTATAAGAGCAACATAATTAACATACACTAGGTTGGA
GGTTTACTTATCTATGTTTAGGTGGTCGGTTTATGTGCAAGTTTTCCATTTTTCAACAATT
TAGAGTTATCAGAGCTACTTATAAGACATGATACTTTTGCTGTATTTAACTTTTTTTGTAA
AGTTCAGCAAGAGTTTTTGCTAGTCCGAGTGGAAATAATTATTTGTTGACTACCCATTTT
CCCTTTTTACTTGAGAAAAAGATTGAGAGGGGGGAGGCAGAGCAGCATCATGAGTCAT
CTGGAGAATGCAAAGAGTACTTTTGATCTTTGGACTGAAGAGTTAGAACGTTGGCCTTC
CTTGATAACAAAATTTTCAAGGGGAGGGGGGATTAATGGATGACTATGAACCGTTATGG
ACAATCTTAAGCAAATCCGATCTTGGGTTTCATGAAAAGGAGATTCCCAAGGGTTGACC
AGTTTTGGTTGTTTTGAAATCTAAAAGATGGACTGATGAGCATCCTTATTGCCTTTTTAG
AGACCTAAAGTTGTCTACTTTAACATATTGAATGATTATGAGACAGTTCTAAGTTTAATGA
ATGGGGACAGCTTTATATCGGTCATGTATGCATGACATTTATTCCATGCCATTATATGAT
ACCTCTACTGTGAAGCCAAGGGTGGGCACAACTTAGCAATGGATACTTAAATCTGGAGA
TTGCTTGGAACATCTTTGTGCATATGCACTTTGTAAGAGCGATGTTTGAAGTCTTGATAT
TGATTCGCTTACACCAATTTAATTGTTTTGTTTCTCTCGTTTTTCTCTTGGTGCAGTCATA
TACTTAAGTTTCTGGGCAGAGGTGCACTACAACTCAATCTATCCTCAAGGAGGTAGTTG
CTTGTACATTTATCTCCTGTTCCTGTTTATTTTGTCTTAGCATTGAGAGTTGAGTGGGAG
TTTGCTGATCTTGCTTAGTTTAGAATTCCATTCTATTATCATATTATTCTAATACTGTAGTT
TGATGCTCCATTCTAGACTTCCTGCCATTTGATCTTAAGAAGAAGAAGAAGAAGTGGAG
TTTCTGGAACAAGCAT
SEQ 28
TCAAGAATCAAAAGCTGAATCTTTCGATACAGAATGGATCATGAAGTCAGAACAGCTTG
TTTCTGCTGTAGACAGTGAAGAAGTAAATCCAAGCATAGAAGTTCCCAAGTTAAACTCC
AAAAGATTATTCTCCAACTGGTAACCCCCTATAACAATTGAAGCCTTTTGATTCACCCCT
CCATCCAAAAATCCCCAACACATCACTTCATCACTTACTTTCACCATTGAATTTCTCCCA
TAAATCCTCCACTTAACCATTTCACTTTGCAACACAAGATCCATAGTTGGAACATTTGGC
CCCACTTTTGTGACATCTATCCCCTCTGTGCTAAAGCAAAGCTCAAATGGTGCTATGGA
TTCCACTTTAGTCAAATTCACGGAAATAGCAATTTTTTCATAAGCTTCCATAAATGTCCTA
TAAATTGAGCTTTTCATGCTAGTAAAAGGGGAAATTGTACTAATCTTTGTCCCGCCAACA
CCTTCTTCATCCATTGTAAACAAAGATATGTTTAAAGACAGTTTATTGCCATTAATTTTTA
TGGATTTGACATTGATGTAATACTCTTCTGAAACACCATTTTTAGATGAAATCAAAGGTG
TGTAAAGCATAGATCTTGAAACATCATGACCCAAAAGTGACAAGTAAGGACTTTCACCA
GATATTATAGCACCATTTGAAGAAGACAAACAGAGAGCAAATTTCCTCTGGAAACCAAAT
GTATCAGACAACTGAGATGGCAATGCAATTCTTGAATTTCCAAGTCCTAACATTCCTTTG
GCACCTCTAGCAAGACCTTGTAACAAAGTAGTTGATGCACAAGAAAACAAGAATTCATG
TATTGAAGCAATTGAACCTGTTTTTAACTCATCTATGAATTCCACAGCAAACATGTCCTC
TGCTAATTCCCCTGTTGCAGCCACTTTTGTGAAAGGATTTTCTGATTGTACACCACAAAT
CTTGTTAGTGCAACCATTAGGTTTAGCCATTGAGCACTTGAGTGAATTACAGGGGACAA
GTTTCTGACTTGAAGATACAGAAGTTAAGCCACAATTAGTCCAGAGAAACGAACCTCCA
AGATCTACAACTAAATTGGTAGGAACAAGATGAGCACCCATGTAAACTTGAGTAACATA
CTGAAAAGTGGACAGATCTTTGTTTACAGGAAGAATAATGGCCTTAGGCAAAAAGGGTC
CATGAGAAACTGAGAAAGAAACAAAGAAAAAGAACGGAAACAAAGGAAGGAATATTTGA
AGAAGTGAAGGCAT
SEQ 29
TTAGGCCTCAATCAGTTCTCTAATTGGTTTGCTGTTTATGTTAGCTGATGGGATATTAGT
GAATTCAGAGAGTATAGCTCTGAATTCATCTCCTGTAAGAGTCTCCTTTTCTAGCAACAC
ATCCACTAATTTGTCGATTGCCTCCCTGTTGTTCCTTATGTGGTTCTTTGCAATTTCATAT
GCTCTCTCAATTATGTGCCTTACCGATGCATCAATGTCTTCTGCTAGTTTCTCTGACATT
TGATTCCTCGCCAGCATTCTCAGCACCACATCACCACTCTGTGTTGCTGGATCTGTTAA
CGCCCATGGTCCTATCTCAGACATCCCGAACATTGTCACCATCTGCTCATGATATAAAC
ATTGGCAAGTTAATACTTGTGTGTATTCGAATATGTTGTTCTCTTTTAATGTGGTGCAAC
AAGATGATGTGTTAAGTAAATACCTGTCTTGCTATTTGAGTTATTTGTTGCAAGTCTCCG
GCTGCACCAGTAGTGATTTCTGCTTCACCAAAAATTATTTCCTCTGCTGCTCTACCTCCT
AAGCTTCCAACTATTCTAGCAAAAAGTTGCTGCTTAGATATCAAGGTTGGATCTTCACCA
GGAATAAACCATGTAAGACCGCGAGCTTGCCCTCTTGGGATCAATGTAACTTTCTGTAC
TGCATCATGGCCAGGGGTCAATGTCCTATAAGCACAAGGACACATTCTTTAGTACTGTG
TCTTTTGATTACAAATAACAAACTGAAAAGATTGAATACTTAGACAGCTTCTTAAATTTGT
CCGGTTTTTTCATCTAAACACCTTGTCTAAGGGCCTGATATATTGAACACTTGATGTTAG
TTGAAAATTCAATAAGGAGCAAATTACTCCCTTTTTTTGCTTCATGTATAATCTAGTATAA
ATGAAAATAATGAGAGGAAAGAAATGATTGTTAACTTACGCGCAGACACCATGTCCAAC
TTCATGATATGCTACCAAAATCTTGTTTTTGCCATCTGTCATCTTGGTTCCTTCCATTCCA
GCAACAATTCTATCGATGGAATCATCAATCTCTTTCGAGGTAATCTTATCTTTTCCTCTTC
TTCCAGCTAGAATAGCAGCTTCATTCATGAGGTTTGCAAGATCTGCACCACTGAATCCT
GGAGTTCTCATTGCAATAACACTTAGAGACACATCTTTATCAAGCTTCTTGTTGTTACTA
TGAACCTTCAATATTTCTTCCCTTCCTCTTATATCAGGCAGTCCAACACTTACCTAATAAA
ATGAAATATCAATATAAGTGAAGTGTATTCTGGAAACTGTATAATACACCTCATTTTATTG
GAATTTTACAATCAAAATCTCATTTTATACCTGTCTATCAAATCTTCCAGGTCGAAGCAM
GCTTGATCAAGAATTTCAGGCCTATTAGTGGCAGCAATGACAATGACTCCAGTGTTTCC
AGTGAAACCATCCATTTCAGTGAGAAGTTGGTTAAGTGTCTGCTCTCTTTCATCATTTCC
ACCGCCAATACCAGTTCCTCTTTGCCTCCCAACAGCATCAATCTCATCAATAAAGACTAA
ACAAGGTGAATTTTCCTTTGCCTTGTTGAATAAGTCCCTAACTCTAGAAGCTCCCACACC
AACAAACATCTCAACAAACTCTGAACCAGAGAGAGATAAGAATGGAACCTCTGCTTCTC
CGGCAATCGCCTTAGCTAGCAATGTCTTCCCTGTCCCTGGTGGCCCTACTAAGAGAACT
CCCTTTGGTATCTTTGCCCCAACTGCTGCAAACTTTTCTGGGGTTTTCAAGAACTCAACA
ATCTCTTGAAAATCTTGCTTTGCATCATCTACCCCAGCCACATCATCAAATGTTACTCCT
GTATTTGGTTCCATCTGGAATTTTGCTTTGCTCCTGCATTATTCACAAACAAATACTAGTT
ATTAGTAGTTGTTGAAGATTACATCACTAGACATAATGTTCAATCTTGATCATGTTTATGG
AATTTCTATTATAGCATACTGTTGGGTTTCTTAAAGAGATGGAAATGATTGAAATTGTCTC
TCCTAAGTTTTATTAACTATAGAGCGATTTAAATAGCCAACTTGAAAATAAAATACACAAA
TTTATAAAATATTGAAAAACCTAAAATATCTCAACAACCTAAAATATCTAACCGAAATTTA
AATTCAAACAAAGTAGACTACTTTTACCACTAAAAATTACTCCTTCTATTTCAATTTAGAT
GATACAATTTCCTATTAGTACGTTCCAAAAAGAATTATACATTTCTATAATTGAAAATAAT
TCAACTTTAAACTCTTTATTTTATCTATTTTAACCTTAATAAAAAACTTTTATAACTACACA
AATATCATGCCCCCCACAAAGCTTTTACCTCTTAAACTTTTTCAAAAGTCTTCTGTTTTTT
TTTTTTAAACTACGTGCCGAGTCAAACTAACTAATTTAAATTTAAACCGAGGAAGTATTAT
TCTAGTAAATTAACAGTAACAGAAGCTATATACAAGACATACCTTCCTAATCCAAAAGGC
AGGTTTGGCCCTCCAGGAGTATTTGAAGAAGAGGTTCTCAACAGCAAAGAGCCAAGCA
ATATCAATGGAAAAGCTAAATTCCCAAGTAAATCAAGAAGTGGCCCTATGACATTCATTT
CAGGGAGATGAGCAGCAAAATCTACATCCTTCTCTCTAAGTTTTCTCACCAATTCTGGT
GGCAATCCTGGCAACTGAACTTTAACTCTCTGGACTTTGTTAAGAGCAGGATTGAATAT
CTCAGCAACAGCACTACTCTCAAAAAAATCAACTTTTTTCACAGCACCTTCATTCAAGTA
TTCCAAGAATCTTGAATATGACATTCTACTTGAAGTTGCTTCAATTGGTGCTTCAGTTTCT
GCTCTTGCTGGTTTAGCCAAAGTCCCTGCTACAAGGCTCAAACCACTACCACTCAACAG
CTTCCTCCTATTTATTCTGGTGTCTGAATATGATTTTTGACATGGGGTTTCTTTACTAAAG
ATTTTAGGATTGTTAGTATCCTTAGAAAGATCTTGGGATTTGCATAGGGGAAATTGAATG
ACAGACAAAGAAAGGGCAGGGGACATTTTCAT
SEQ 30
TTAGGCAGTGGGATAAGAAGCGTCCATAGCAAGTCCACAAAGGCCTTCTTTCTCATGAA
CATCCCTTTTGATGCGCATATATCCACTGTCACCCCATTTACTGCCCCATGAATTCTTTA
TAATCCAATATTTTGTACCGTCAGTTGTTGCACCATATCCCACTGCTGTAACAGCGTGGT
TAAGCCAAGTGCTGCATGATCCACTGAATACACCACTTGAATAGAACTGGAAATCGAAG
CTACTCCCGTCTATTGCCACCGAAACAGGTTGATTAGCCACTGCCTGCAATAGAGCCTT
CTCACTGTTCGCTGGCACATCTTCATATCCTGTAATAAGAGGCGTAAGTCATAATTTCAA
GCTTATGGATTCGGAATATTTATCGTTTGAAGTTGCTGGGCTAGATCATAATTAAACCAA
CTCACCCAATTGAAGATTTGTTCTACCCCTTATATTTTTATGGGCTTACCTGTAATTTTGG
CTGCTGAAAGAGCTGACTTTTTCTTGTTGCAGACACCATCTTCTCCTTTGTATGGATAGT
TTACTTCTGTTGTGAGGCCCTTGTTTTTCAGGATGAAATCAAAGGCAGTGTCCAAGAGT
CCACCGCTGCAACCTTCGTCCTCGCCTTCGACATCACAGTCTACAAGCTCTTGCTCTGA
TAAAGGGATCAACTCTCCTGTTTTCAGTTGGTGTAGCCCTTCCAT
SEQ 31
ATGGGATGCCGCATGAAATTCTTGAATGTGGTTTTGGTGGTGGCGGCGGTGATGGCTG
CTGCCGCCGCCGTGGCCTTCGGAGCTGAGAAATTGCCGGCGGGAGTGCTTAGTTTGG
AAAGGATTTTTCCTTTGAATGGGAAGATGGAGCTGGAGGAGGTTAGAGCAAGGGACAG
AGCTAGGCATGCTCGAATGTTGCAGAGTTTTGCTGGTGGTATTGTTAATTTTCCTGTTGT
CGGTTCATCTGACCCTTATCTTGTCGGGTAATTACTTTGTTACGACCAATTTGATAAGAT
TATATTTGTGATGTTTTTAGTGTTTTCTTCCTTTTTCTAATGTGGAGTTATATTGCTATATT
TGCTATATTTTATTTGGTATGATGACGATGATATGGCTTGAGCTTAAATGGAGAAGTGAT
GATTGGTATAGCGGACTCCAACTTGTTTGGGACCGAGGCGTTGTTGTTGTTGAGTTTTG
TTTGGTTAATTTAGTCATTTTTTGGAAAGTTTGATTCTTTATGATGTTAAAACTTGGAACT
TTTGGTGAATGTATGGAAGCTATGGACTATTTGATGTGTTATTAACGTCTTATGAATTTG
ATCTCATGAATTCTGATGTAAATTTTGTTTTAGTTTGAGGGTAATTGATTTTAAGTGTATT
AAAGTACTTGTAACACAATGAATTTTGGTGTGCTGTTTTTCTTTTCTAGGTGCTTTCTTGT
TAATTATCGGTTGGATGGTGTTGTTGATGGTAGTGATAGTTCTGTTTGCTTTATCTTGTA
TCGTTTCTTGTTCAGGTGCAAAATATTTAGGTACAATTGAATGATGAGTTTCGTGTTGCT
CTGAATATGAACATTAGCTATATCAGTTTGGCATTTGCTTTCTGTTATTTGTGGATGAGG
GATATTCTTATTGATTTGACTATCAATTTTGTTGACCATCGTCTCTTTCTCTCTCTTCTAT
GCTTTTGGTGTATTTGTAGCCTTTATTTTACAAAAGTAAGACTGGGAACTCCACCAAGAG
AATACAATGTGCAGATCGACACTGGCAGTGATATCCTATGGGTCACATGTAGTTCCTGC
GATGATTGTCCTCGGACAAGTGGACTTGGGGTAACTCATCTTCCCTTCATCTTGTTATTA
CTTTTTTAGTTTCTTGTTTAAAGTGTGGTGAAGGAATAAACTGTTACGTGGGTGCAGGTT
GAGCTCAACTTCTATGATGCTACCATCTCGTCAACTGCTTCTCCCATTTCTTGTGCAGAC
CAAGTGTGCGCCTCTATAGTTCAAACTGCCTCCGCTGAGTGCTCTACGGAAACCAATCA
GTGTGGTTACTCCTTTCAATATGGAGATGGGAGTGGCACAACTGGCCATTACGTAGCC
GATTTACTATATTTTGACACAGTCCTGGGAACTTCTTTGATTGCCAACTCTTCAGCACCG
ATTATTTTTGGGTGAGTTCTTATTTTTTAAATACCCCTATATCTATACTTAAAATTTCATTA
GAAATAGTTGTGGGTCATTTGAACCAGAAATATCTTTGGCCCAATTTACAAAAAAACCAT
GTTTGTTTACTCAAAGCTTATACTTGGATATGATTTAAAACAGGTGCAGCACCTCTCAGT
CTGGGGACTTGACCAAGACGGACAGAGCAATTGATGGGATATTTGGGTTTGGTCAACA
GGGTCTTTCAGTAATATCTCAACTGTCTTCTCATCGGATTACTCCTAAAGTATTTTCACAT
TGCTTGAAAGGAGAGGGAAATGGTGGAGGTATACTAGTCCTTGGTGAGATTTTGGATC
CGAGAATCGTATATAGTCCCCTTGTTCCGTCACAGTACGTATTGTTACAGTACAATGAA
GTTTCTTTTCTTGCTTATGACGAATATAGAGATTTAATTGTTTTCATCTTTAGTGTGCCTT
GTGCTACATGATATAAAACAGTTGTGTTCTTTATAGTTTGTGATCCAGCTTGAGCATGTG
AAATATACCTCTCATGCGCTACATCCTGATTTTATTGAAATTTCGTCACTATATTATTGGT
TTTGCATCTACAGATATATAGTAGTTGGGTCTTGGGAAGATGACATCAATGAAACTTTAC
TTTGTACATATAAAAAAGGGCAGCCCGGTGCACAATTTTGAGTGTTATATATATATATAT
ATATNNNNNNNNNNNNNNNNNNNNNNNNNNNNNNNNNNNNNNNNNNNNNNNNNNNNN
NNNNNNNNNNNNNNNNNNNNNNNNNNNNNNNNNNNNNNNNNNNNNNNNNNNNNNNN
NNNNNNNNNNNNNNNNNNNNNNNNNNNNNNNNNNNNNNNNNNNNNNNNNNNNNNNN
NNNNNNNNNNNNNNNNNNNNNNNNTGTGTGTGTGTGTGTGTGTGTGTGTGTGTGTGTG
TGAACATGTCGATATATGTGTTTATTTTTTATGTTTTTCTACATTATTTGTTTTCTAACTAT
AAGCACGGGGATTGGCTGGGCACTAGGAAAGAAAATGGTTTGTAGCAAGCTTGATTGT
ATCCGCTTTCCACTTTTGCAGGGCGCATTACAATGTATATCTGCAGAGCATTGCTGTTAA
TGGACAGTTGGTGCCTGTTGATCCATCAGTGTTTGCGACATCTGGCAATCGAGGAACTA
TTGTGGATTCTGGTACAACTTTGGCTTATATTGCCACAGAAGCTTATGATCCCTTTGTCA
ATGCTGTAAGTTCCTACATTTTGCCAATTTATTTACTCCCTCCGTCTCAACTTGAATGTC
CAATTGCTCTCTTTGTCTATACCAAAATTATATCCACATCTCCTAAATATAAAAACTGACC
ACATAACAACAAGAACAACTACGCCTGTTGGGGTTGGCGAAAAAGGGCAGATAACTGTT
GATCAAAACCCCTGAAAAATGTTTTATCATTCATCTGCAGATAACTGCTGCTGTTTCACC
ATCAGTTAGGCCAATCATCTCACGAGGAAAACCGTGCTTTCTAGTGTCCTCGAGGTTCA
TCCTTGTATAATTCAATAGATATTTACTTTGAGCTTTTAATGACAAAAATGTCTTTACCCA
ACTGCTTTGGTGACTCGAATATGACACCCTGTTTTGTTCTGAAAACAGCATAGCAGAGA
TATTTCCCCCAGTTTCTCTAAACTTTGATGGTGGTGCATCGATGGCTTTAAGACCATCAG
ACTACCTTGTGCATATGGGCTTTGTCGTGAGTACCAGAATCTGTATTGTGTTTGAATGTC
TTCTTGAAGTCTCATCTGAGACTATATCAACAATGCTATATGCAGCACTATTGTCTTTTTG
ATGAACTACAAAGCTAAGTGACTCAATTGAATGTTTCTAACAGGAAGGTGCTGCTATGT
GGTGCATCGGCTTTGAAAAACAGGATCAAGGTGTAACAATTTTAGGAGGTTGGTTCCTT
GTTTACTACAATATTTATGCCTCAACCCCAAGTGGGTTCGCTGGTGTATTTATCAACATA
TCTTCTAGGACTATGGTTACATCTAATATCTGCTGCATCATTACGTGTGCTAGCGTCCTT
AATGGGTGCTTAAGCACTCCATCACTCAAACCATCTAAAAAGGACCTAACTATACCTTGT
CCTGTATTAATTTAAAAAAAAATATAACTTGGCGAGTGTCTGCCTAGATGGAATGTACCT
TAGTGATTGCATGCTTAGATAAAGTCATCATTCCTGCAGATATCGATGTTGATGAAACAC
GGCCATCCATTTTCTATTAGAATATTAGGTCATTGATTTGCAATTTGAAAATTGTAGCTTG
AAGATTGCAGTCCCTTTGTCTTTTCTAATTTTGCATCCGTTCTTTTATTGTGATTGACCAG
AGGATAGGTATACTTGTAGTACCAGTAATTCGGTTAGATATGTTCCGTAGCGTGCCAAG
GAATTTATATTTCCTGTTTTGCCTAGTTTTTCGAAGTTTATGTCAAAGTTACTTGCTTTGG
ATTCCGTGCGTGGGACAACTATATATCTTGTAGAGGCAGTGATTGTTACTTTGATGTTGA
AAGACAGCAGAGGGTGGAATTCATAGAAAGTTAATACGTGGAAAGGGGTGTTAGACTG
GATACATGACTGCAGTCCTAAATCAAGGTTGGAGTTGCATTTAATATGGCTATTCCTAAA
GGCTAAAAGACACAGTCTCATCAAGATTGTATGTTGAGAACAAGTCTACGAGAGTGCGC
TCTGACTGTTCTCAGAGATAGGTGCCTCAGACTCTAGGGATTAAGCTAACTACGTGTTT
TGAGTGGTGTTTTGTTCTTTCTTTTCCTTTTTCACTGCTGGCTAACACAACTTGAAGACTT
GAATTCCAAACTGCTTCAAGTTTTAGGTCTATTATTCATGCCTTCTAACTTCTTAGAGTGT
TGGTTCCCTAGTCCTCTTTTTTTTCCAACTCGTGCATGCACGCTCATGCCCGTATACGTA
CATGCAAGACATCTACAGTTGTAAACACAATTTATGACCAAATATTAACGGAAAGGTATT
AATCCCTTTCTATTTCTTGTTTGTGTGTGTATGTGTAAACCAAGCACAATGTTATGACCA
ACATTAAGTGAAGAGAATTAATCTTCTTTTCTTTTGGCCCATGTCCGTGTATTGTATGCG
CATTGAATGTGTGAGCCTTTCCTTGTTTATCCTGGTTATGAGTTAATCGGTAGCATACAT
GGTGAGGTTTCAGGATGCATGATAGTTGCAGATGATAGTGTGAATTAACAAAATTAGTC
AAAAGCAGCTCCATGGTGAAACACTTAGCAAGGTTTTGGAATAAGTGGAAACAAGATAC
TATCCAGGCAATGCAAGTTTACTCCGCCTAAAAAGTATTAAGGTGAAATGATATTAGATT
ATTATGGTTCCTAAATGCTGGCAGTCAAGTTATTTAAGCTCAAATCTTCCAGGAGAATAG
AGAAATGTCGTGGTAGATGAGGAAGGAACACATAGAACTAAAATATGCTGGTTGACATG
AAAGAGTGTTGCATGAGTGTTATTAGACAGAAAGATTCCTAGAAAATTGAAATATAAGTT
AGTATAACGGTTGTGAGATCAACAATAATATGTGAGAGTGAACATTACATGTCCGCTAAT
TGAATATCATAAAAATGCGGATGTAAAGATGGTTGTGCAATCATATAAGATTGAACATGA
TTAGAAACAATCACTTTTGTTGAAGGGTGCAAGTAGGGCACATATAGAGCATGAAAAGG
ACGTCACATGAGATGGTTTGGCCATATCCTATTAGTCCGCCATATGAACCGGTTATTAA
GTGTGGCAATATTGTGTTTAAAGTGCTGAAAGGAACGAGGTAGACTGATGACTACATTC
AAAAATTTGTCTCAAATGACTTAGAATCTCATGGAGTCAATACGGCTTGAACTATAAACA
AAACCTTATGGAAGAAATGGATCCATATAGGCAATACTAACTAGTTGAAATAAGGCTTAC
TTGATTTTACTCTACTGGGTGCAGTATTTGTCAGGAGTCTTTATAATTTGGTTAGAGACA
TGTTTGTAAGTGTTGGTATAAGTTAGAGATTTAGAGAACCTCTAGATTTAAGAGAACCCC
TTGTCTTAAAAAGATTATGTACTATCGGAGTGAATTATTTCAAAAAAAGAAGATTATTTAC
TATCAGAGTGAATTGGGTTCAAATAGAGCAGAATGGCCCCAAATGATATTAGACCTCAA
CTAGTTTGGGACAGAAGTGTAGTTGATTTATTGATATGCATCTTATGTGCAAATTTTATTT
TAGTCATGCGTGTGCCCTTGAGCTCCTTCCTCTTCCCTCTTCCCTCCTAGTCATTCTACT
AAATTTGGCTATTCAATTAGTTCTGGCTATGCTTTGGCATTTGAACCATGTATTCCTTGT
CAGTTGACTTATTGCATTGCTCTGCATCTTCATTTGTCGAGTATTCTGGATCCATAGATA
AACAAGAATCTAGGTTGGTCTAACTGTATTTTTCTTGATTTTCAGATCTTGTTCTGAAAGA
TAAGATCTTTGTGTATGACTTAGCTCGGCAAAGGATTGGATGGGCAGATTATGATTGTA
AGTACCTCTTTTCAAAAATGAAGTCAACATTTGCTTTTGTCTCTATTTTGCCCCCTTTTCT
TTTGGGGTGGGGAGGGGGTTGTTTGTTGTGACATGACTTACTTCTTCCCTCTGATTTTC
TCTCTATTTTTAATGGTTTTCATGATTAATGTTTTTATTATAGGTTCATCATCTGTGAATGT
GTCTATAACCTCTGGCAAGGATGAATTTATCAATGCTGGACAGTTAAGCGTGAACCGTG
CATCAGGCAGTTTGCTGTTCAATCCGCGGCACACTAGAACTATATTTCATCTGCTATCG
TTGGTTCTGATGATTGGTTCCCCATTTTTAACT
SEQ 32
TCAAGCAACAATAGGGTATGATGCGCAAGTTGCAATACCTACAAACATATCATTAGGAT
CAGTTATTTACCTCATCAAAATCATGACTACATTGACTAGAAAGTTTTTATTATTATTTGT
GTCGATCTAAGATGAACTCAACTTGAACTCGTATATAGAATAGCATTATAGTTCAGATTT
TGTGGCCTCTTTTTTTATGGTCCAAGTTGAAAGTTATTTTTCATTAATTTATCCTAATAGA
ATAAGCTTTCACAATCCGAAAGCAGTGTGCATCCAGTATGCAGAAAGGGGGAAAGGAG
ACTTGATGATGTGGGAGAAACTTACCACACATGTTCTTTCCCATCTCCATTTTGAAGTAT
CCATTGTCACCCCATTCAGCTCCCCACGAGTTCTTGATCAGCCAATATGGAGTACCATT
ATCAACACCATATCCCACAGCAAGAACAGCATGGTTCACATCCTGTCAATGCAATAGAA
AATGTTAATGTAGTATTATGTCATTGTCTCGCATATTTAGTGAAGGTCGGACCATATACT
TTGTTGATGTCATTGATATTTAACAAAAGAAGAAAAAGAATATGTGCCTCTTCATTGCAG
CAAAATCAATCATGTCTCAGTGCCAGATTAGTTGGGTTGGGTGGGGGTATGAATCCTCT
GTGTACACTGCTCATCAGACCTTTTTATTCCAATACTACATAATCTGTATATTAAGGCAG
ATTAGGAGTTTCTAAAAGTAGAGACTATTTCAATCTTTCCTATCATCCAGCATCTTTTTTT
GGTTGACAAAGCATGGTATCTTTCCTATCAGTATTATGACACTCGAATTGTTAAAAATCA
ATAAACACAGAGAGAGAGAGACACACACACACATTACGCATAACTTAAAGATAATTGCA
GACACCCTTCTCGACGAGTAATCAAGCACTGGGTTATAACTAACTACTGGGTACAATTC
TTTCCCCTACGGTGAGTTACATGGAAAATGTGCTTCTTCATCGACAAAGAATAGCAGATT
AAAAGGGCAATATCTCAAATTCATCGGAACTAAAAACTCACCTGGGGAGTGTTGCCACA
TACGGTGCTGCTGTAAATTCCACCCTTGTACTGTTTGAAACCTTTTACCACCTGATAAGC
TACACTAACCGGTCTAATAAATGCAATCGCGTATTTTAGTTCATCTTCAGCACCCTGTAA
TTATAAATGTTTAATTGTAAGGAATCCAACCAATGCCCATTGACCTTTTCAGGTCAAATA
ACGCATATTAAAAGATCCACTCAACTGAAAATCATCAACAATGAAACACTAGAACTATGA
AAGGTTTTTCCCGTCGGAAAACTACAATAATCTTCCTTTAGTGTGTCAAATACAAGAAAT
GATAAGCACTGATGTAAGCAGTTAAAAGCTGATCCAAGACATTGCTGTTCCAGAGTAAA
GAGGTATCCTACCTTGGTAATATTAACAGAATCAACGACTTTAACAGCAACATTTTCTGA
CGAGAATTTGCATACACCAGCCTTTCCAGCATAAGGATATTCTTCTTCAGTGTCAAGAC
CACCACTGTATTTAATGTACTCAAAAGCCTGTGATGGAAGCCCGCCATGGCATCCAAAG
TTATTAAAAGCTCCAGCACAGTCCAAGAGCTGCTGTTCAGACAGAGAGATGTTCTTCCC
AAATGCCTGGGCATATGCTGCCTCCAGAGCACCAGTAGTGCTGCCAAAACATCATGCG
CCGACTCCGTCATTTTTCAACTTCAGAAACCCGAATAGAATGGAAAGGATATAGAATTTA
CATGTTGTTAAGAATAAGTAGTTTAGGCTTAACGCATAGTTGATTAACGATTGATAGGTA
GAATGCCATTCCAAACTGAAAATTTAGGAACCTAGTGACATGATCCTAACTACTCCTTAC
CTGAATGTCCAGCAAGACCCGCACTTGCCCTGCTTCTTCACTGGGCTTACTATCCCTGC
TTCCCTCCAGTCTTTCTGAAATGACACATTCGGAGATCAAAATTAGGAACAAGAGCTACT
TTTGGTAACCAACAATTCGTTCACTTAGCACATGCTCTTCTAGGCAGCGGCTGAATGGA
AGGCAACTGTTCCTGAACTTACTACTACTTTTAGCTTGGAAAAGAAGAAAAAGTAAATAT
ATATAGATAGACAATACACACACACGTTTTTCTAAACACACATATATACCAAATTTTTATT
TCATTCAGATACAGTGGATGCAGCAGTACTCTGCACCTCTTGACTTAAAATCCTACGTC
CAGCGTTGCTCCTAGATGCAACAGCTATCTATGTTGTCATCTCAAGAAATTCCATCATCT
TGAAAGTAATAAAAGTTAAAACATAACAAAGTGATAAAAATCCAATGAAAGAAGAATGAC
AGCAATATTAGGCTGCAAAATGGACAAGACTAAGCATTTATGAATTTTCCTTTTAGGAGA
ACATACAAGATAGAGGCACAAAGAAAGCACTGAAAGCTAGATTTCCAATAACAGGATTT
CCGGTTGGAGTGAATGGATGCAAATGGTAATGATTTTTGAGAAAGTATCATAAACAACT
GCAGAAAAAGATATAATGGAGTTCTGATTGCAAATACCGTCTCTGGTAGGTTGACATTA
GTGAGCTGAAGATCGCTCTTTGTGGTAGCGGAACAGTTTTGAGGAGCTCCTAGCCTTTC
TCTCCTAAACTCATCCCATGTTAGGTCAGTAAACTCTGCCAAGAAGCATAGTCATTGTCA
AGAGCAAAATACAGCAAGCAAAATATGCAGTGCCTTCTTGTTTCTTTATTTTGTTTGTTCT
TCTCCTTTACCTTGACCTTGGTTTTCATATTTTTATTTTCCCTTTCTTCACTCACGTACAA
GAAATCTGCTAGGAGTTCTAATTAGAAGTAACAAAAACATTAATCTACTACATTTTGAAC
CACAAATCAAGTTTTTGGCGTCGTTGAAGTCTTAAGAAGGCATCCACCTTAGCATCCGC
ACCTGGGCACAACAAGGTTGAGGGAACAGAGGGTGGACGCGCAGCATCCACCCCAGC
ATCCGATGCTGAGAAGATCAAGATGAGGCGGACGCGAAGCATCCAACTCAACATTAAT
CCCTGAAGCTGATTCGGGAAAGCAAAAGGAAAACTTTGGCCCATAACTTTTGGACGCAA
TATATAAGCCAAAAACGGCTCTTTTAGGTCATCGAACACACTTTTTGAAGGGGATTCGA
CCTAGGGAGAGCAAGGAGCCGCCGTGGAGGCCGAATTTCATCTTCTTCCGCCAAACTT
AGTAATTTTTATGTTTCTTTGTATGATTTGTTGTTTGGCTACCATGTCTATGTGGAGCTAA
ACTTCACGTTCTAATGTTCTGGTTCTTTCATGACTATTGTTATTCGAGTTGATTTTCGTTT
CTTGATTTATCATATTAGTTTATTTATTCAATCCTGCGCTTAATTATTTGATTGCTTGATCA
CCAATTAAAACTATCTACGAATCTAGAATTGAACTCGAAAGTGTGAATTCTAGATTGCAT
ATAGGATTAAATAGAGCAAGTTCTTGAACCTGGGTATCGGGGAACGGATTTGCGGTTAG
GATAAACATATATACCCGATTGCCTTGCTTGGTTGATTTACACGAATTTCAAATGCGTTC
TTGTTAGTTCTAATTCCATAGACATATTGGCGTTAGGTTAGCTTGAATAGACGAGTAAGA
ACTCGAGAGATTCTTATGAGCAATATTAACACTGTCAACCAATAAACTAGATAAATTAGT
TAGTCAATTCAATTGAAGAATACAATAGGAATGTTAGATAACTCATAACCCTAGATCGTT
TTCATTACACTGATAATATAAAAATCAGCTCTTCCTTTGTTCAGAGTTCATTATTTATTTTC
TTTTTAGTTTAGTTACTTTTGCATCACTACTTTTGGGTTTAATCCTTGTTTAGATAATTAAC
AAGTCCTCATGGGTTCGACACTCTATCTTATCACTTTATTACTTGACGACCGCATATACT
ATACAAGTCAACTTTATGTATCCACTCTATTCAGATCATTTCATGAACTATAAGTAAGAAG
AAAAACCAAAACGAAAAAGGGCAAATTGTCCATAAAGGCATATATTGTCCAGCCTATAG
CTAATAGGAAACCATATAGTATACACAAAGGCAATTACCATTGACACCAAGTTTGTAGGA
AAGTCGTTGCTTGTTGTGAGACCTAATCATCTTCAGATTGTCCAAGTATATCTCAAACCT
TTGCTTGATCTCCTCAACTGAGTCGTATCTCTTCCCATACCTTTTAAAGTTAACAGATAT
CCCAAAAATAAATAATTTTTAAGTAAAAAGGAAAACAAAGCTTATTCATTCAAATAGGAG
GAAATTAGATGAATCGAACTGACCTGCGAACAAAGCGAACGAAGGAGAGAGCACGGCG
CGTTTGGCCGATGAGTTGGAGAATTCCATTCTCCAGCTCCTGCAAACCGTCGGATACTA
CTACTTGCCTGATCGGATTATCATCGTCAAACGTCAACGCTCCGCCTTGTGCGGCGGC
GATTGAGGTCGCGATGAGTAATAGTAATAGTATAATCGAGGCGCGAGTCAT
SEQ 33
ATGAATCCTGAAAAGTTTACTCACAAGACCAATGAGGCACTTGCTGAGGCACATGAACT
AGCTATATCAGCAGGGCATGCTCAATTTACCCCCTTACATATGGCACTGGCCTTAATAT
CCGATCACAACGGTATTTTCCGGCAAGCTATTGTGAATGCTGCTGGTAGTGAAGAAACA
GCTAATTCAGTTGAAAGGGTATTCAAACAAGCCATGAAGAAAATCCCTTCTCAAACACC
AGCACCTGATCAAATCCCACCTAGCACATCACTGATTAAGGTGCTCCGACGAGCTCAGT
CGTTGCAAAAGTCTCGCAGAGACACCCATTTGGCAGTTGATCAGTTGATTTTAGGCCTT
CTAGAAGATTCCCAAATTGGTGATCTTTTAAAAGAAGCTGGGATTGGTGCAGCAAGAGT
GAAATCAGAAGTAGAGAAACTTAGGGGAAAAGATGGCAAAAAGGTTGAAAGTGCTTCA
GGGGACACTAATTTCCAAGCACTTAAGACTTATGGTCGTGATCTTGTTGAACAAGCAGG
AAAACTTGATCCTGTGATCGGTAGGGATGAAGAAATTCGAAGAGTAATTCGGATTTTGT
CGAGGAGGACGAAGAATAATCCGGTGCTTATTGGTGAGCCTGGTGTTGGTAAAACAGC
AGTAGTTGAAGGGCTAGCACAAAGGATTGTTCGAGGCGATGTCCCGAGTAATTTGTCT
GATGTTAGACTTATAGCATTGGATATGGGGGCATTAATTGCTGGAGCAAAATATAGAGG
TGAATTTGAAGAGAGGTTGAAGGCAGTGTTAAAGGAAGTGGAAGAAGCAGAAGGGAAA
GTGATCCTTTTTATTGATGAGATTCACTTGGTTTTAGGTGCTGGTAGGACTGAAGGGTC
TATGGATGCTGCCAATTTGTTTAAGCCAATGCTTGCTAGGGGCCAATTAAGGTGCATTG
GTGCAACAACTCTCGAGGAGTATAGGAAGTATGTCGAAAAGGATGCTGCGTTCGAAAG
GCGTTTCCAGCAGGTATACGTGGCTGAGCCTAGTGTTCCTGACACTATTAGTATCCTTC
GTGGGTTGAAGGAGAAGTATGAAGGGCATCATGGTGTCAAAATTCAAGATAGAGCTCTT
GTGGTGGCAGCCCAGCTTTCGGCTCGATACATTACAGGTATGTCCTTTTTTGGATTGTC
ATTGTATTTTATGAATTTTACCTTTGATCTTTAATCGAGTAAAGATGCCACTACAGGAATA
TAGCAATGTATGTAATGTTGAAATGTGATGTGTCACACGTTTGTATTGTGGTTGTCAAAA
CATTTCCTAAAATTTTGAGGAGATAGTCCCTTTCCTTTATGTCTATGCAGGATGGATGTG
AATCTAGTTTTATACTTAATTTAGCTGAATCACGTCCCATTTGAATGATAAAGTTATTTTC
TGCTTCATTGTGCTTTTCAAGGTGATAACCTCTAACCTTTGGTTTGTAGTTTCAGACTTAT
AAAAGTATGATTGGTGCGTGCTCACCTTAATTGATTGGATGGGATTATGTGTTTGCTCTC
TATTAATACGAATTTTCTTTAAAGCTTTTTCTCTCCCTTGCTATGGAGAATTGCTACTGTT
GTTTTGCGTATCATTTGCCAGTTTGCCATAATTTTGTGCATATAGGGATTACTAATCTGT
GAATTTACGTTCAGGTCGTCATTTGCCAGATAAGGCTATTGACCTAGTTGATGAGGCTT
GTGCAAATGTAAGAGTTCAACTTGATAGTCAACCTGAAGAAATTGATAATCTTGAAAGAA
AGAGGATTCAGCTAGAAGTTGAACTTCATGCACTTGAGAAGGAAAAGGACAAGGCTAG
CAAAGCTCGACTCGTTGAAGTAAGTATACATCCCGGAAATGCTTTGACCTATAATTCTAG
AACCTGTGTAGGAAATGTGGACAAATAACGTAATTACTATTTCAGGTGAGAAAAGAACTT
GATGATTTGAGGGACAAACTCCAGCCTTTGACGATGAGGTATAAGAAAGAGAAGGAAA
GAATTGACGAGCTTCGCAGGCTCAAACAAAAGCGTGATGAACTCACGTATGCTTTACAA
GAAGCTGAAAGGAGATATGATCTTGCTAGAGCAGCAGATCTTAGGTATGGGGCTATCC
AAGAAGTGGAAGCTGCTATAGCAAATCTCGAGAGTAGCACAGATGAGAGTACAATGTTA
ACTGAGACTGTTGGACCTGATCAAATCGCGGAAGTAGTCAGTCGGTGGACTGGTATTC
CTGTGTCAAGGCTTGGTCAGAATGAGAAAGACAAATTGATTGGTCTTGCTAATAGATTG
CACCAAAGAGTGGTTGGGCAGGATGATGCAGTTAGAGCTGTTGCTGAGGCTGTATTAA
GGTCTAGAGCTGGGTTGGGAAGGCCACAACAACCAACTGGTTCATTCCTTTTCTTGGG
ACCAACTGGTGTTGGAAAAACTGAACTTGCTAAGGCTCTCGCTGAGCAGCTCTTTGATG
ACGACAAGTTGATGGTCAGAATTGACATGTCCGAATACATGGAACAGCATTCTGTTGCC
AGGTTGATTGGTGCTCCACCAGGGTAAGGACCCTTTAACTATTGATAGGATAAAAGAAC
AAATCATACTTTTACGAGTAAACTGTATCTGCCATAATGAGATTGTGGATTGCACCTTTT
GTAGAACTCTGTAGCCTCATATTTGTCTAGGTACTTAATAGTTTTACGTCTGAAGTGATG
AATGCTGAACATGTTATGTGTGTGCAGTTATGTTGGACATGAGGAAGGAGGACAACTCA
CTGAAGCTGTGAGGAGGCGCCCTTACAGTGTAGTGCTTTTTGACGAAGTGGAAAAAGC
TCATCCCACTGTATTCAATACCTTGCTCCAAGTGCTGGACGATGGACGATTAACAGATG
GCCAGGGTCGTACCGTTGATTTTACTAATACAGTCATCATTATGACCTCAAATCTAGGA
GCAGAGTATCTCTTGTCAGGATTAATGGGCAAGTGCACCATGGAGAAGGCCCGCGATA
TGGTCATGCAGGAGGTAAGCTAGAACAGCCTATTTTCTGCTAATTTTCTGAGCATTGTTT
CCTAGTTTACATCTTTATTTGAGGAAGGATTGTTCACATATATCTTTTTGTGACAGGTGA
GGAAGCAGTTTAAGCCTGAGTTATTGAACCGGCTAGATGAGATTGTAGTGTTTGATCCT
TTATCACACGAGCAGTTGAGGCAAGTATGCCGTCACCAACTGAAAGATGTAGCAAGCC
GTTTAGCTGAGAGGGGTATCGCCTTGGGCGTTACCGAGGCCGCGTTAGATGTCATACT
TGCTCAGAGTTATGACCCTGTAAGTATCACCATCTGGTATTTCAACCTGACATTTCATGG
TGATTAGACTAGGGTCTGAGTTGAGATACCAACTATGCAGATTTTTGCATTTATCTTGCT
GTGGCGGGTTACACTTGTTTTTTCAGTTGCTAATTTCACTTATTATGGAAAATTATTTGTA
GTTACATTTTAGGTGATCTAACATTCTAAAAATTATCTTAGAACCGTTGGCGTATAGAAG
CGAAATACTTTTGACAATTGATTGTGCTAACTTTTGTTACAATTACATCACAGGTTTATGG
TGCAAGACCTATTAGAAGGTGGTTGGAGAAAAAAGTGGTAACTGAGTTATCCAAGATGC
TCGTGAAAGAGGAGATTGATGAGAATTCTACCGTCTACGTCGATGCTGCATCCAGTGG
GAAAGATCTAAGCTACCGAGTGGAGAAAAATGGAGGGCTTGTCAATGCTGCCACTGGG
AAAAAATCTGATATATTGATTCAGCTCCCTAATGGAGTGAGGAGTGATGCTGCTCAAGC
AGTGAAAAAGATGAAGATTGAAGAAATAGTAGACGAA
SEQ 34
TCACTTGCTTTCAGGTATGATACTAACAAGGAGACATACTATGCCAGTAACAACAGGGC
TCGCCACACTTGTGCCAGATAATCGTTTACAACGTGTGCTGATTTTGGATCCCATAATCT
CACGCCCATATGCAACAATGTCTGGCTTTACACGACCATAACTGTCAAGGCACAGTACA
GTTAAGAATCTATGGTTTGATAGACGAGTGTAATTATTTAACTGTTATTAGAAAAGCAAG
ATCCTAAAATATTCAAAGAAAAAGAAAGAAAAAAAAATGAAGCAAAGAACCATAATTTTG
AACTTAATTCTTTTTCAAGAAAAAAAAGAAGCAACAATAACAACACCAATAACAAGCCCA
GTATTTTTCCACAAGTGGGGTCTGGAGAGGGTGGGAAGTACGTACCCTTACCCCTACC
CTAGAAGGACAGAGAGCTTGTTTCCGATAGACCCTCGGCTGGAGAATGGATGACAAAA
ATAATGGCAACAATAAGGAATAACAACAAGATAAAAATACTGAAGCCAAGAAAGCAGCT
AAACTCTAGGTAATAATAGCAATCTATGAATAAAAGGATATCATACTAACACTGATGCTA
GCGAACTGGGAAAGACAAAGAGATACGTTCGACTACCTACTAGCCTTCTACCCTAATTC
TCGACCTCCACACCCTCCTATCTAGGGTCATGTCCTCAGTCAACTCCAGTTGCGCCATG
TGTTGTAACCTCGCCCCAAGACTTCTTAGGCCTGCCTCTACCCCTCCCGATACCCATTG
TGGCTAACCTCTCGCACCTTCTAACTGGGGTTTCTATACTTCTCCTCTTAACATGCCCGA
ACCATCTCAACCTCGTCTCCCGCATCTTTTCCTCCACCGAAGCCACTCCCACCTTATCC
CGAATGATTTCATTCTTAATACCTAGTATGCCCACACATCCATCTTAACATCCTCATCTC
AACTACTTTTATCTTCTGGACATGAGTGTTCTTGACCGGCCGACACTCTGTGTCATACAA
CATAGTTGGTCTAACTACAGCCTTGTAGAACTTACCTTTAAGTCTCATCGGCACATTTTT
ATTACACAAGACACCGGTAGCGAGCCTCCACTTCATCCATCCAGCTCTGATACTGTGTG
TGACATCCTCATCAATCTCCACATTACCTTGTATTATAGATCTAAGGTACTTAAAACTACC
TCTCTTAGGGATAACTTGTGTATCAAGCTTCACCTCCATGTCCGCTTCCCGGGTAACGT
TGTTGAACTTGCACTCCAAGTATTCCGTCTTGATCTTGCTCAACTTGAAACCCTTAGACT
CTAGAGTCTGCCTCCAAACCTCCAGCCTCTCATTAACACCACCCCGACTCTCGTCAATC
AGAACTATGTCATCAGCAAATAACATACACCATGGCACCTCTCCTTGAATGTGTTGCGT
CAATGCGTCCAAAAAAAAAAAGAAGCAAAGAGCTTAATTGTGACTTTTTTCTATTTCATG
TTTACGGTTCATCTTTCTTCCTTTCCTTTTTTCCTTAGAAGCTGAGTGGATTGTACAAGA
GGCATTCAACAGATGTCATGCTCCTATTCATCCATAAAGTTTTTGCCATTTTCACCCATC
ATTTTCCACTCAGCAGAATTTTACTCGAAGCATCACAACCATGGATAGAATAAAGCTCAT
AGAATGCTCGTTTGTTTCACAAGAGCTGATTTTTAAAGGCATCTTTTTTAAATGAAGTTG
GTACATCCAACACACTCATTGACTTCCTATGTGGTCATATAGTAGAACACAACTTTAATA
CAGAGAAGGAGAGGGCAGAAAAATAAAGAATACAGACTATACTCCATTGCAAAGAGTAA
TACATAGCAAAGAAAGGAGAAAGAGATACCCATGAGGAATCTCCCAGGTACTCATTCCA
CGTGAAGAAAATGAGGCTAAATGATTACTTTGATCAATGGCACCAACACCAATAACATC
ACTTTGATCAGCAGGATTGTTAAGAGTACCATAAAGTGGTCCATCATTTCCAATAGCAGA
AACCATGATAATATTGTTGGCAGTAAGCTCCCAAACCTAGCGGAAAATATTGATTACGTC
CATCAATATAAAGCAACTATGAGGAGAGACTCCAGAGAGTAAAGGTGTTAAGACAAGTA
GAAATAAGACTGAATATATGCATGCTAAGTTTAGCAAGCATGAGAAGAGTGAAGTTGAG
GTAAGATTAGATAAGATTCCCATACCTAAAATGCACACAATTCAGATATCTAGACTCATT
TTCCATGAAATTAGTATGATCCGTGAAGATATCACATCAAATTTGAATAGAATTGGTTGT
AATGGAGGTGCGCTACAGAGGGTTATGTGATAAGAGGATACCTATCAAAGTTAAAGACA
AGTTTATATTGGGGTAAATGTTTGGCTTTGTATTAAAGATATGAGCATCACCAAAATGCA
TATGCAAGATGGGTATTATAAAAGTTTCACAAGATAAGAAATGATCAAATTTGACAGAAC
ATAAAGGATAAAATAAGAATGTCGTTTGAGATGGTCTCATCATGTCCTAAATAAATCTCC
AAAGGCACTGGTCCTTAGATGGAAACCATGATGATTGGAGGTGCTAAAAGAGATGTATA
CCTAAAATCACATGGAAGGAAGTTGTCCCAAAAGACTTATAATCTCGTTGAATTCATACA
GACTCAAAACAGAACACAACAGAAGCAAAAGTCTGTTATACGCGATATCGACTATTAAG
AATCAAGGTGTAGTCATGCTAGTGCACTTACTTTAGGTCCAATGTCTACTAGGAATCTTT
TTAGTCTGTCTGCACTTCTGAAGTTTGTATGTCAGTAGAAAAAGAACCTCCAGATTTATA
GATATCCAAACTACTGAATCTTTGATGACTCCAAATGGAGCAGAATGGATGGTGAGGAT
TCATTAGCCAACCCAACTAGCTTGGAATTAAGGAGTAATTATTCGTGTTGTTGTACATCT
CATCAATATAAAGGTGAAAAGTTCTGCTAATGTTGTTTCAGGTCCTGCTGAAAGTAATGT
TAATTTCAGTGAAATGACAGGCTTAAACAACTCCGAATCTCTTTTACAAAATTGAGTACT
AGATATAATATACAACCCTTGTGTTTAAGACATCCATGACATAGTTCAGCTTGCAAAATT
AATAGATCTCATGAAACAAACGCCCCATTAAGCTCAAGAAAGCCAAGTAAAATCCATGC
ACTGCATAAGAAATATAAGATTACATGCTGCCAATTATAATCAAACTTCTAATACTTCCGA
GACCACATATTATACAGAAACTTAGACAATAAGGGGTTATGGAACAACAGCAAGATCAT
TTCAATGCCTATGCTGTAGACAAAATGCAATCCAGTATCATACCACATAAAAACAATAAA
GATATAAACCAATAGATAAGTGACCTCACCTTTTCCACAAAAGGGAGATCCAAATAATCA
GGTCCACCTATGCTCAAATTCAGAACATCCATGTTGGTTGCAATTGCGTAATTAAATGCA
TCGAGAAACCACGATGTGTAAGAGACCTGCAATAAACTGAAGAGCCACTTCTTATAATG
CTAAATTGGTCATTACAAGATTGATCTTTTTATTTCTAACTTTTTTATAGGTCGCCTAGCG
TTGTCCTTGTCTGTAACAGTAGCTTTAGTACATGAGTTAGTGTTATTTATGTATTTTCGTA
TTCCTTGACTTATGTGATTACTTGTCGTTGCTTTCGTTCCGGCCTTCTAATTGCAATACT
CAGTTTTAGTTTTGTTCCTTTGTATTTTTTGCTTCGGTTTTCTAATTGGTGTGCTTGTTGC
TGCTCTTCCTTTTATCTTTCCTAAACCAAGGGTCTTCCGGAAATAACCTCTGCCTTCTTG
AAGGTAGGGGTAAGGTCTGTGTATGTACTACCCTCCCTAGACCCCACTTGTGGGATTAC
ACTGGGTCTGTTGTTGTTGTTGTTGATAATGATGGTGTCAAAGCAAAACTTGTCTCGACT
ATTCCAAGGATACCTGCAACCTCCCACTAGCACAGGTACCGGGTATCTCAACCCACCAA
GGCTTAGGCAGATGGGTAGATATCACCTAGCATTTTTTATCTAGGCAAGGATTTGAACC
ATAGTCTCCAAAATTTTAACCCACTTCATTGAACGCTACCCAACACCCTTGGGTGCTACA
AGATTGTTCCTTTTTGTGTGAATAGACTCTCTTTCAAACCCCAACATCAAGGATTCAAAC
CCATCGAACCCATGATGTGCGTCTAACTCACACATCACTTGTTGCGCTCTTACCACTAC
ACCAAAGCCCTGGGGGTGAATACTCCATATCATCTTGATTGTCCTTACTTGCGGATATG
GTTTGTAGCTACTGAAATCAATAGATTGCACAAAGCCAATGATAGGTAGCTTAATTGGAA
AAACTGAGGTCCAAGAACGATAAGGTCTTGGCCTCAAAATCTCCATGAAAGGAAAATAG
TATTTAATGTGTGCCTTATGTAAGTAATTTTGTTTTCCAATTTACTATTAGCAACACTGTT
ACTTGTTATAGTATCTCAAACAGCGCATACAGTTTTTATAATATTTCAAACTGCTTATACC
TCCCCAATAGTGGGCTAATACTAAGTATGGGCTTCCTTGAAAACAAAATAGGAATTATAG
ATTGCACATAATTCGCAGACAAGTTCCTGGCTTTTCTAAAACATAAAAGTAAACAATGTC
CTCCCTCCCCAATCCCCTGAAAAATAGTTGCAATCTTATCACTAAAGTCATAATAAGATG
GCAGAAGAAATATTATATGTTCAATAACATAGCATGTAACATGGACTCCACCACTAAATC
CAATCAGTGGGTTTGGCCGCTGGAAAGGGTATGAGAAAACTGTGTATATTTAGGTGCAT
ATTCTTCCAAGATATTGTAGCTTAATGATGAGAAGTTAAAGCTAGCACAAAATAAGGTGC
AGAAGCAGAACTTGTCATTTACAGAGACTAGGCAGTCTAAAGTATTTTTTCTTCCATTCC
AGAGGACTTTTCACTAAAAACTATGACTGCAAGAATTTGCTATATTAGGTTCACCACTCA
TGAGGTGGATGTGGCACACTCTACTAGCAGAAAACTGGAAGGGAACGGGGGAAGGAT
CTTAACACATCAAGTATTTGCTTTGCTGCAATTAACAACGAAAGGACCGTTTGATCATAG
GAATCATCATTAGCACTCAGCAAGAAGCAGACTTGTATAAAACATCAGTACAATAAATTA
GAGGCAATAATCCAAGACATCAGATTGTTGAAGATCTTCAAGTCTCAGCTTACTTAAACA
GTTTAAGAAAATAAAGCCCCGTCACCCCCCAAAGAAAAGGAATTGGAATACTCGTTCAA
AACAATCCATTACCTGTGCATCTGTAAATACATGGAAAGCATAGATTTCCGCATCTGGA
GCAAAACCGAGGCATTCTTCATCCTGACCAGCAATAACACCAGCTACAAATGTCCCGTG
TCCAACATTGTCATTCAATGTATCTTCGTTGGTCCAATTTGTGCGTTCCTGAAATTTAAG
GTACCAAGCCCACTGTCTGTTATTAATGACGTAAAGATGGTACGAAGATATATACATTG
GCATATATGTAAATGTCAAGCCTCAAACCACATTGGATTCAACTAAAGCATTTCTTTGTT
ACAGAAAATATATTTTTAAACGACAAAAGACAAGATACCTTGATATTACGAAAATGTGGG
TGATCTGCACGGATGCCTGTATCAAAAATTGCCATTTTGACCTTAGCACCAGTATGCCC
TTTTGACCAAAGCTCATGTGCCCCAAAGAGGGATGTGACTCGAGATTTCTGCAAAATAA
TCATACAGGACAGACTGTATATCAAGAAAAATACAGCGAACAACAACAATATGTTCAATC
TAAAAAAGAAATAGAAAATAGAGCAGCAACATGAGACCCAGACACTCAAAGAATGCAGA
CCATGTTTTTCAAAAAGGAAGTATGCCCTGACAACCTTGAGGAAATAAGAATGACAAATT
ATAAACCTATTAACACTCTCCGATCTGAATGTTACGCTCCAACGGCCAACCAAGTTAAA
GTGAGCCACTTAATGATCTAAGGATATATAATCCATTCTCGTTAGAGGTACTTTAGTGTC
TTGAAAGACTAAAAAAACAAAACATGGTCATATATCCAGTGCAAAAGAGAATATTGGGG
CATAGCAGAGACAACTTGTGAAATTATATGGATCACAGGGTCGCACAAAGATTAAACTT
TATAGTGATCAGTAAGGTGCAGCTTCTGTGTAATAATCAAGTTTCCCTTCATATTGCGTT
GAATTCAGTGTGTCATGAAAGATATAAAAGAATATTATCAATTGTAACTTCGTCACAGAG
AAGATAATCTCAGAAGTCATTTTCACAAGTTCGTGAAGTCGAATGCTTAGATTGTAGATA
TATCCACGAGTTCTTCACTAGTCCCTGAATTAGTCACATATGTAACAAGCACTAGAAAGG
GACTGTTAGATAGTTACGGGAAAATAGCTAAATGTAAATACTTATATTTATTATAAGTGTC
CCACTTCGGGAAAACACAGGTATAGATATTATTACATTGTCAAGTGTGCCCATAAAAGG
AATCAGTTGTAAGATATTAGTCTTCAAGCATTCTCTAATCTTTCTCTTATTTTTCTCACTAT
GGAGTCTCAGCATCATGACATATTAATGGAATAACAGACACTTGATTAGACCAAAATAG
GAAAAGGACAAAGACAAAAGGGAACTGAAAGAGATTAATTTCCTTTGAACATATACCAT
GCAATAAAGTTGCAACTATCATATGTCATGAATGCAAAGAGAAGAGTTGCATACATTCCA
ATGATGTAAATTATCAGTAAACGCATACAAAATAAAACACAAATAATCAGTGGTCTTGCC
TGCATCAATAGATGTCTGCTCCAGCTAATTCTCATTATACTAGTGTTGGCCACCGCATAG
TTTTGACCTTCACTGAAGGACATAGCAGTAAAAATCTTTCCTGGCCTCTTCTTCCCATTG
GCAAAAGCCCCATTCTTCTCACTCTTCTCTTCAAGAACTATCCTTTGATAGCTCAAATCC
AACGAAACGTCTTTTACAAGATTCATTTTTCTGAACTTTTCTAGCAAGAGTTCTTTCATTG
ACTCGTCGATTTCCACCAATCCAAAGTCAGTAGGAAATCTCGCAGCCGGATTTTTCCGC
TCAATCCATTGCCAACCCTTAAATTTCAAGTTGTTTTGAAGATAATTCCAGTGATCCTCA
GGTTCCTTATAATGATAGAATCGAACAATATAATTTCTGCTATCAGATTGTTGCTTCTGG
TCATGTTGGCACTCATCGGAGCTACTAGAAATTAATGGCTCAGACTCTATTGGTGGGTT
GAAGCGGATGAGTGTATATACCGGAAGGAAGGGGACAAGTGAGAGGGTGAAGAATGA
TTTCTTAGGAGCTTCAGGCAT
SEQ 35
TCATATTGAAGCGACCAAGTCTTCAGTCTCAGTCGTCTGCTGAGAAAGGGTGCCTCCAA
TCCACCTCTTGAGCATCTCTAAGGCAACTTTAGGTTGATCCATTGGAACCATGTGTCCA
GCATCGTGAACCTGTTATAAGACACCAAAACAGTTAGCTCAAACATCCATCAGTAGAATT
TGAACAATAACATCGACAAAGAAAGGCACCTTCAGGAAACTCAGAGGCCCATGGCTTTT
CAACAATCCAGCTTCAGAACTGTCAACTTCAAAAGGAACATCGGGAGATGCTACAAACT
CTTTCTGACCACTCCATTCCATAGCCTGAACCCATCTTGAGTTACCTGGTAAAAGAGAG
GCGTTATAATATCCGAAATATTTATGTGAAAAGTTTCCATCATTAGGCTTAGAGTTGAGT
CAAAGCTTACCAAGCCAGTTGCAAATAAGATCATATTCTCCAGCATAAACAAGCAACTTT
ATTCCATCCTCGAGCAAGGTTGGAATGCCAGCCTCAAGATTCCTCATCCAATCAACAAG
CATGGCCTGGTACACAGTAGTGCTGCATGAGACAAACTCTATATCCTCAACTCCAAGAG
CCTGCTTAACAGAGTGCATATTCAGCAATTTCTCCATGTTTGAGAAGTCATAGCAGAGT
GCTCCAACGCATTTCTTTCTGATGTCGTAATGCTGCAGGTGAAAGCTCAATGGATCAGA
AATATGGTTAATCAGTCATTTGTTCCAAACTTTGGAAGGCATGCCAATGACAATGTGACC
TCTTGAGTAATTTAACATATTCAACATGAAATGATATGGAGTAGCGATTTAGAAGAAATA
GATTTCTGGGATCATTTCTACTCTTTCTGAGGCTAGTAACACCTATTTCTCTACGAAGTA
CAGAATAAGTGTAATAGGCACTAGAATTAGTAGAAAACGGGAAACAGACAGAAAGGGCT
GATAACTTACATTGATGTCAGCCCCAGCACGTGCACGAACAGCAGAGAATATAGAATTG
CAAACAAAATAGGCAGCCAAGCAAGAGATTTTCCCATCAGTACCTAAAAGAATAAAAAA
GACAGAGAAACTGAGAAGCAAAACAAAGTACAGAGAATTGATTTGCTGTGGTCAAAGAA
CATCCATTTACTTCATCAGCTCCTTCCCCTTTTCTTTTTCACCCAGGGAAAGCCCGAATG
AGTCAAATGATATGGAGGAAAGAAAGATAGTAAACAGTAAATTAAATAATGTACCACAAA
GGTTTATTGCAACTTCACAAACTGGAAGTATTTTGTTGATACGATCATGATCAGACTTTG
AAATTAATCCCATGTCCAATGCATAGTCAGTATACGCAGCGTATTGTATTTTGGGATCTG
TAAGCCCATTCCCAATGGCAAATCCCTGTTCAAATACTTTCAATGAAGTAAAGACACATG
ATTAAGGAAATAAGAATTCAATAACTGGGAAAATGAGGTACCTTTAAGTTTATATGTATT
CCTTCTTTAGCCTTGTTTCCCTTGTGTACTCTAGCAGCAAAAGCAGGAATATAGTGCCC
AGCATATGATTCTCCAGTTATGTAGAAGTCATTCTTTACAAGCTCAGGATGCTCTTCAAA
GAAAGCCTACACCATTATTAATGATCATACCAACACAAACAAGTCAGGATCATATTATCT
CTGTTACGCATCAATTTAGAAAAATGCTAACTGTGTCACATAAAAGAACGAATCTGAAAT
AGCCAATGTGTCACAAATGCTCAAGAGAATTCATACCACATTCGGCCTTCAGAATTTGC
AAAGCAGAAAAATACAACAATAAAAGCAACATATAACAATATTTCCAACTAGAAATCTGT
TGAAAAATTCACGTTCCGAATAGGTAATGTATAGTCTTAAGGCGGCTAAGCCAAGTTCT
GCTAAATATTCTGGTTTAAAAGCTGTTATACATGCTAACAAAATGCATCATGAGGGAAAC
AACTGACCAACAAGTTACCCAGCCAAAATTCAGGGATCAGCTGCAGTTTGTAGTAAAAA
ACAGGAAAACCAGCCCATGAAGAAGGGTATTGAATACTGCAAAAAGGTTGAGGGACAG
GGTTTTCTAGCAATGTGATCACATCTTTTGCCCCTAATGCATTTGGCAGATAAATGGAGT
CAAAATATTTTAACGCCTCCATTTTTGTTGGGATCAGAACCCAGGCATCAACCAACTATC
ATTTCATAAGCACAATATAAGACTCAAGTCCTAGTATATGACATCTCTCCAATTATCTATA
TGGTAAAAGTATTAAGTGACCATGTTTCTTTTGACAAGAGTGGGTTGCTCTAGTGGTGA
GCACCCTCCACTTCCAACCAAGAGGTTGTGAGTTCGAGTCACCCCAAGAGCAAGGTGG
GGAGTTCTTGGAGGGAGGGAGCCTAGGGTCTATCGGAAACAGCCTCTCTACCCCAGG
GTAGGGGTAAGGTCTGCGTACACACTACCCTCTCCTGACCCCACTAGTGGGATTATACT
GGGTTGTTGTTGTTGTTCTTGTTGTTTCTGTAAGGCTCGAGTTCTAGCATTAGAAATCAG
CCTTTTGAGCTCCTGTAGACCTATTGTACTGTACCCCGTCTTTGTATCACATGTACACAG
GTGATCAACACACAGACAAGAGAACTGACAAGCAAACCGCACTCTGAGAGTCCGAGCA
ATTACTTGAAAGGGATCCCAGACAACCCTTACTGGCACCAGTACTTTAATTTGTCACCA
CTCACCAGGCGGCCAATTCTAGACAGGTCAGCAAGGCGATAAACAGAGGTGTCTTAAT
CATCACAATATCATCCCGCACACAGGAGTGGGGATCAGCAAACACTTCTTTTATAACTG
AGAAACTATTGTTTCCAGCATTGAAACTGTGGATAATGAGCCTGCCCCTGTACTTTCTTC
AATTTTTTTCAGAACAGGATTCAAACTACTGACATGCGCCTACCACACATCCCATGTTCG
AAATTGAAACCAAAGCTCTGGGGCACTGGAGATTAGCAAATAGGCTAGGTGATTATAAA
GATATCATTCAAGAGTTCTCCTACTAATTCACGGTACTTTCTACAAACCCCTCCCTCCTT
CCACAGTTGATCACAATAAGCTTGACTACTGACGTATATGTCAATACCACAGCCTCTGT
GAGATAGAAAAGCTTCCATAATGACTACTTGAAAGGAGACCAAGGGGGTTTAGAAAGTA
TTTATCATTCTGTAAGCTACTGCAACAATAATGATTTTACTTAACGGAAAGGAATGCCAT
AAATGAATTTGTATTCTTGAGGATGTTCACAACCAGGACTGAAGTTGCTTCCACCCCTA
GCTACATTCTTTATCCGTATTAAGGAAAAGTTTACCATCCTTTTTTTCCAGGTGAAATGTT
TTATTGGCCTTTAGAAGCAGGACAAATTGTCCAGTGCAAGCCTCATGAATAACATACAT
GAAACTAGGAATTGATAGGTGAAGAAAATATAGGAAACCATCCATATCATTAAGTTAAAC
AATTGACTCTCTGTCATCATACGACAATGATTACAACGGTTGATTCCAGAGGAATAAATA
TGGTTCCAAGTTGCTTTAGGGGTTTAATTTCACACAGAACAAACCTGTAGGAAGTCATA
CAAGTCGTCGCTAACACCTGCTTCACTGTGACGGATGTCATGTCTGTCAGAACTGTAAC
TAAAGCCAGTACCTGTAGGTTGGTCCACATAGATAAGGTTTGATACCTGCAGAAATAAC
ACGTCAACATCATTTCTTCAGGNCGTCAACATCATTTCTCTAGGTTTGGAAAATCTATTA
AGGTATTCTAGTGTCCTTGTAGGAGAAAAAGGAAAATCGATAATAAAAATGAAACATCTA
CTTTACAAGGAACAAATGTGGAACACAAGGCAAACTTGACACTCTAGGAGTCAGCAATA
AAAGACCCAAACCACAAAAACCAAAACTCAAGATCTTATGGAACATAAAGCACTTTCCTC
TCTGCATTCTTGAATTGCCGTGCAGGTAATTTTTTTCAGTAATGAGAAAAAAGAACATTA
AAACAGGCAGAAGCATGACATGGAATTAGGGAAGTGCAGTATCAGAGGTCTAATGAAA
AAAATATGGCTGACATGTTTCCTATGCAAAGCATTAAGATTTCAGTAAAACACAAAGCTC
CTTCCGGGAAAAAAAGTTTTCTTGCAGTCTGGTTGATGATAACTACATAAATGCTGAAAG
TGTAACTATCTAAAGGCTAAAAAGGACATTTCTCCTGACAGATGTATCATGTGCAAGAAA
GAAATGGTCCCCACAGATTTTCTTCACATTGATGAAGTATCAATTTGTGCCTGTGAATTG
GCATTGCATTCATTTCAGGTTGGTTACTGGTACATCTCGAAGAAGGATAATGGTGAAGC
TTGGATTATCAAAGCTTAATCACAAACCAGTATCCTTATACTTATGATTCTTCGATTTTAC
ACAACATTGAACTAGATATAGACATGTTATTAACTGTTTTATCTTGATTTCCTTTTCAAGT
AATCTTTTCAAAACTAAAAATGATAATAACAAAGAGGAACATCCACAACGAACAAGCTTT
TTCGCTAATTGGCACTTTACAAATAAATTAGCAGGCTGCAAAACTACTTATCATGAAAAC
GACTGGATAAAGGACATGCAAAAGATGTTGCCAATGCAAAATCTAATAATCTATACGCC
CATGCACCATTATACTCTTAACTTTCATGTACCATTGAGTAAAAGCAAGAGAAAGTCTTA
TACTATCGAGCTGAATCATCTACTAAAGAGCAAAGAAGGTAAATTGCTACTATTGCTTAA
GCAAAGCTGTGTTTACATACCACAATAAACTGCTGTTAAATAGCATAAACCATTAAGACT
ATAAGGTGGTCTTAAAGATAGTCAATTACCTTGTCCCACCCATATTCATTCCGCACAAGT
GACAAATTATTTGAAATAGAGAAAGGTCCATTTTCATAGAAAAGGGCCAACTCACTGCT
GCAACCAGGCCCTCCACTCAACCAGATGACAACAGGATCGTCCTTACTACCGCGTGAT
TCAAAGAAGAAATAGAACAACCTACAAAATGAAAGATAACACAGTTTCAAGCTAAATAAG
AGCCCAACCAACAATAAGAAGAAGCTAGTTGATACGTTAGACAGGAAGACGAAGATATA
AAGCCTTATTACTCCGGAGATGTATATTTTGGTAAATGCTCACGAAAGACAAATATTTAA
ATGAAACAATGTTGCAGCATTCCTTTCAATTCTTACAACTGATTTGGAAACTTCTTAAGC
GCACTGATTGAGTTAAACAGATAAGTGGTCAAACTGTAACAATCTGATGGTTCCCCACA
AAAGCTACATGTAATGACATTTGAAGGTAAATAAATCAAGCAGACAGAATATTTCTCCAT
TAATCAACCAATCAAATAATTCCAAATTAATTGGGTTGACTAAATGAATACTCTTTAACAA
TTCTGCTATATTTAAATCCAATTTGTTGCAATATTAAATAAATATCCTTTGAATTCATTTCC
ACACCAGTTACAACCGTTTTATTCGAATTTCCGAAGTGGAAAGTGAATTTGTAGGAGGA
TAGAGGGGAATGCAGGGGTGCACTGCACGATAGAAGACTACTGAGAACTTGGCTACAT
TTTGTAGACAACAAAAACCTATTACCCCAGTACACCACAATGCAATGCTGAATCCGACA
GTATTTTAACATAAAAGAGAAAAGAAAAAATTGAAACTATAATTTGGTTGGATGCCTATG
ATAATGCAAATCGGAACAAGAATCACCAAAAACCAGGAAGTGTTTGAAGCAACAAATAT
GGTACTAGTCTGTTCCAATTTGATAAACTTTCTATTTTTGGGACGTCCGGGAACATTTGA
CACCAGTTTGCTAGTATCTTAACAATTTTCAAGATACTCTAATTCATTTCTTTGAAAAGAA
TAGACATTAGGCCTAACTCAACATCAAAAGCTAGCTCATGAGGTGATTGATTGTTCATTC
AATATATAAGGAGACAACAGTCCACTCACTCCACCAATTTGGGACACTTTAATATTTCCA
CACGACGAGGCCGTGGACAACTGGAGTGTGGACAGCATAACTTGCGACCCCAACATG
GAGAAACACAATGTCGACCTTACCCTACCACAACCTCAAAAACTAGCTCACGAGGTGAG
GAACGGAGGATTGCTTGATACCATAGGAGACAACACTCCATTCCCTCAACCAATGTGAC
ACTTCAACATTATGTGTTATTTTTATCGAGTTACATTTTCTACAGTTATCGAAATATGTTTC
TTACAATACTACATCGTACATACTCTAATAATTAAATCAAATCAACATCTTAAATTCCGTG
TTCAACTAAACACTACCATAAAAATCGAGACAGAGATTGAAAAAAAAACTTAACCTAGGG
TTTGAAAAGGTACCTAGCAGCATGAGAATGCTTAATCTTATAATAACCGGCATGATGCC
CCAAATCTTCAAAGGATATAACACTCGAATTCGTCAAATTAGCGAAATTAAATCGCTTCT
CGACGATTCTAGAAGCAGCGGTGGGAAATGGATCCCGATCGACAATGTTATCGGATTC
TTTCGGGAACAAATTTAGCTCGTGTATCAACTTCTCAGCTTGCTTCGATGCTAACTTCGA
AGATATTGAAACCTTCGCGAATGAAGAAGGAGAAAAAGCAAGGAGAAGAACAAGAGAG
AGAAAAAGGGAAAGTGAAAGCTTCATTTGCGCCAT
SEQ 36
TCAAGAAGAAGGGGTCTTCTTTCCCTCATTTCCGAAGGTTCCAATAGGTTTGGCAAGAA
TGTGCTGCATTGCTTTGACTCCTAGTGGATTGTTCTTGCTCTGTACCAACAACATTTAAA
ACACAATCACGTAAGTAAATGAAACAACCATATCCTTCTGAACAAAACTGTTAAAAGATA
AACCTTGGCCTAACTAAAGGGCAGCACGGGGCACTAAGCTCCCGCTATGCGCGGAGT
CCGGAGAAGGGCCGGACTACAAGGACCTATTGTACGCAAACTTACCCTGCATTTTTGC
AAGAGAATGTTTCTAAAGCTCGAACATATGATAGCTACTTTACCAGTTAAACCTTGGCCT
AACTCAAACAAAAATCTAGCTCATGAGATGAGAATTGCCAAAGAACCCATTCCCTTAATC
AATGTGCGACAATCTAACAATAACAAGCAGAGATCACTTACAATTGAGCAGGTGCCTGC
TTTAACATTGCAGACAGGATAATCATGTGGGCAACAACTGTTATGGTCTTTACAGCAAGT
AGCTCCTTCCATGGGACAACAACCCCAAGCAAAACAGTAGTTATAATACTTGTAGACAC
AGCAGCACGTTGTTCCGGCTGGGCATTCGTTATAATCATCACATTGAGTGGGTGGCTTG
ACTGGTGATGGAGGAGATGGAGCTGGTTTTGGGGGGTTTTGGCCTGTCTTTACAGGGT
AAGAAGCAATTGTAGCAATACCACACAAACCTTTGGGGTTGCCAATGTTTCGCTGCATC
CTGAGGTAACCATTTTCTCCCCACGAAGCACCCCATGAGTTCCTCACGATCCAATAATC
CATGCCATTTTCACTACCATATCCTACTGCAACCACACCATGGTCCACTGCTGCACCAC
ATTTTCCGGTAAAGATACCCTGGAGCATAGGCGGATCCAAGATTTAAACTTAATAGGAT
CAACATTTAAATTTTTTAATACTGAACTCATTGTGACTTTGAAAATACAGAAATATTTGTT
GAATCCGTGTAAATACTGGCTAATTCGATCAAAAAGATAACAACTTTATTGACAATAGGC
AAATCTGAAGTAATACCGATTTATAGTGCTGGAAGTCTTTGCCGCCAGCTTCGATAGCA
ACGCTGACGGGTTGACCCGCGACGGCCTTTTTCAGTGCCTTTTCATCATTAGCAGGAA
CATCTTCATACCCGTCGATGGTGACAACCTTGGCATTTTTCTATAATTGTTTCAAACAAA
ATATTAATAGTCATAACTTGTATTTAGTTCATTTCCAATAATCCCTTTTAAGACAGAGAAC
ACCATACTGACCCTTGCTTGATCGCATTTTCCATCTTTGGCTTTGTAGGGGTAGTCTTCT
TCAGTGTCTATTCCTCCATTTTGAATGACGAATTTAAAGGCATCGTCCATTAGACCCCCT
TGGCAGCCTTGGTTATCGGCAGTATCACAATCTACCAGCTCTTGTTCAGATAACGAGAT
CAGATTACCTGTCATTATCTTGTTTACTGCTTCAATTGAAGCAACTGCTGAGAAAGCCCA
GCAACTCCCTATTTCATTTCCCAATTGTAACACAATTAAGACGAAAATCATTAGTTGCTTT
ACGTAATATAAAAATATCATTATTTCTTCAGCATTTATTTATGCATAAAATGGAAGATAAT
CCAATCAATCAAGGCTGCATAATTTGCCAAAACAATTGCACAAAAATACATACTGATGAA
CATAGTGTTTTGTTCAAGGGAAAAAACATTACTTATATTGCCATAATTAGATGCGGAAAT
TGGAGCAAAAGTCCTGCTAACCTAATTTATCATACTTAACAACAACAATAACAAATCCAC
TGAAATCCCATCGTGTGGAATCTCCTTACCCCATCTAGATAAAGTATAGAGACACTTTCT
GACAGACCCCAAAAGATACAAAGGTAAAGAGGAAAAAAGGCCCACGAAAGGTAAAAAG
CAGGGAATTAAATAACAATAAACAGCAATACCAACAAAGCAATCAGAAAATTTAAAAATT
AAACATGCTTAACCTTAGCTAAAATTAACAATAATGAAGGGTCAACTGAACTTGCCATTG
ATCTTAGGTTAAAACTTATGACACTGTGATCATTTGAATCCCTTACCCTAGCAAACTACT
AAATTTTCCGAATTTCCATCAAAGCCATCAGTAAAGAAAGCATTGACAAATGTTAAACAG
AAAATAAGTATTAACAAAAAGGAAAACAAAAACAAGTAAGAGGTGCAGAGATGAAGAAG
GCAGAGTACGAAAGGAAAATACCACATTGTCCTTGATTTTTGACGTCAACAAGAACACC
TTTCTTCCTCCAGTCAACGGAATCCGGCAAACTATCTCCGACCTTGGGGGCATAACGGT
CACTTTGGGTATACGACAACCTACTACGACCATCGGGCTTAGTACCCAAGTAGATGGAC
TTGTACTCCTCGTTGGTCAAATCTGCAAACTGAGTCAAACCCAGCTTGTAACTTTTTTCA
GGCGCAGAGTTCTGTTCATCGATGTATCTAAGGTTGTCCTTAAAGATCTGGAACCGCTT
GTCCTTTTCTCCTAAGGCGTTATACACTTTTTTATGTTCAACTAGCCAAGATTCATACAAA
GACACGATTTCATCGTCTGTTCGCCAGACCGTTGACTCGCCGTTCGTGTGATGTTTTTC
GTTGTAGCTTATAATGGACATGTCCTCCGCCGATGATGTTACGGCGGAGAACATGAGC
ATTACGAGTATGGAGATGGAGAGGGTGGAAGTATGAATCGCCAT
SEQ 37
TCAGGAAGGCGAAACAGCAAGAGGATTCAACAAAGTGCCCACGAACAAAACAACACCA
GCAGTCTCATCTTTCACAAGGAACATGAAGGGATGATCAGCAACAAAGTCTATCTCCTC
TTCAACCTTCATCATCGAGCACCCGAACATCATTGTAGCAACAGTAACAGCTGGAGCTA
CTGGAGCCTCCTCATTTACTTCGATAAAGGCCTTGTGAAAAGCTTTTGCAGCTGGAGCT
TCTGCACCTTCCTCATTTACTTCAATAAAGGCCTTGTGAAAAACGTTTGCAACTGCCAGA
GGATAATTCTCGCCCACCATCTCAGTGAGACCACCTTTAAAAGGTAATGTGAGCTCGAG
TCCTTTTAGAACTTCTAAAGCTTCAATCCCCAAAGATATTTTGAACTTAGGGATAAGAAA
CTCGTGCACTTTAACTTTTTCATATGGAACATGGCGATCCAAAAATCCAGGTTCCGAACT
AATTTTCTCCAGTAAAGTTGGTAATCCATCACGGGCATTTGGGAGATACACATACATGTT
GAGAAATCGCTTGTCCTCGCCCTGTTTATAACGAAGCCTTAACACTTGGAAACCATCAA
AGGCCTTCACGTATTGCCTTTTTTTGCTGGTCATTAAGGGTGCTTGAACAGATCCTCCAT
TAAGGAGATGGAACTCATGGTCTTTTGTATCTGAAGCATTCAACTTTTCAGTCCATGCTC
CTTTGAAATATAGTGCATTCGCTAAGATCAGACTTGTACCGCTATTGACTGCAACAGGA
GGAAGAATTTGTTTGATAAGACCATTCGTTTTCTCTTCAGCCCACTTATTGACTTCACCA
GTAACCTCATCACCCTACATAAGAAAAATTAAAACAAACAGAGAACATAGAATCAGCAG
GCTAGTAACAGGATAGAGTTGAAAGTAAAAGAAACAAAAAAGATGTCCTATATGACATTA
GATTCGTTTGTTTGTAATCTTATTCGAAAAGCATAATAAACGTTTCTAATGTGCTTACTAA
TTTGAAAATATTCTGTTTACCAACATGCCCATAATATTTTGTTATACATTATAATACTCCCT
TTGTTTCGTACTTCGAGGGTCAAACTTTTCAATTTTAACCGTGAATTCGAACATGAAATTT
TAATTTTTGACATAAAAGTCACATATTTAGAGACTGTAAAAGTAATATAAGTCATTTATAA
GGAATATAAGAAAAATCGCAGTCAAGAAAAACTCGACTCTCGAAATCCAAAAGGTGTCA
CATAAATTGGGATGGAGGGAGTATCATGTAATTTCAAACATCAATTTCTTTTCTAGTGAG
TGAAGGATTAAGACTAACCTTGTTCCGAAAATCAACAGAAGCCGAAGCAGCCTTATAAA
CATTGTCCATAACCTGTTTGAAAGAATGCTTAAAAGACAAAGATTGGTCAACCCAGGCC
CAATTAGTGACAGACAAACGAGGACCTCCCATGGGGCTGCCATCGGCTAAGACGTCGG
TGATGACCCGAGAATAAACAGAGTTAAGTTCTTCAACAGAGTTGAATTTGAGAAAAGCC
AACAGTTGATCCAATGTGGAACCACTGGAGCCTGCTGCAATAAGAGCAAAAATTATTTG
AATGGAGACCGGGGAAAACACCATGTTTGCGTTGTTGGACTCGTCCTCGTCGGCTTTA
AACTTGCTGAAGAATACATGCTTTGAAAGAATCAATGGAACATCCATCATTTCTGATGAG
GGAAACTAAAATTGAAACAGAGAACGTAAATCCATAAGATGAGGGAGACTGAAACTGAA
ACGGAGAACAGAAATCCATAATTTCTGATGAGGGGAACTGAAACTGAAACTGAAACGGA
GAACGGAAATCCATAATTTCTGACGAGGGAAACTAAGGTACCTTCACAGTTGAACTTGA
CAGCATGGAGAGAATGCTGATGCATATAGAACTAACAGTCATGGTAGGCGACCACGAG
TCATACAGAATATCTGCAAGACAGAAAATAGTTGTCAACTGCTGCTTTTATTAGATGCAT
TCTAACTTTTTTCATGAGTCCGGTAGAAAATCTTAATTATTAAAAAAAAAAACTTATTCTG
GAAGATGAGAGGAATAACTGTGAATGAAAGGCGTTTTGCTTTCACTTTATTAGGCAGGT
AACTATAGAAAGTTTAAGAGATTAATAAGCAAGCCATAGGCATAGAGCAGAAACCAAAA
TTATGCAGGAAAAGAAACTAGTATGATCTCTGCAATTCTTAGATGAAATGACAAATTTGA
CGAGACCCACAGACAAACAAAAAACAGATCCAAAGTTTATTCTACTAGGGCTAAGAGTT
CTGAATCAGTAAACAACTGTGTTTTTTAATCATCCGTCAACCATCATTGACTATTACTCCA
TAATTAGATACGAATCAACAAATATTATCGGGACATGAAAGGGGAAAAGAATCAATAACA
AAAACACCAAGACCAAGTAAAAAGCTCACGGATATAGCGAGACAATCTACCATCATACC
CATCATCAACTAAGTTGGCATAGAGCATTTCCAAAACTATAATACCTGTCATCTAATCTTT
ATTAAGAGTTCATATCACAAATCATCCATAATTGCCAAGGATTTTCGTTAAATGCTTCATC
TAATGCATTCTAAATCAAGCCATTAAGCTCGAAGAGTAACCAAATAAATAAATTTCTGTT
GGTGATAAGAAATAGAGGAGACTTGAGCTGTTGAATAAATACCTAAACAAATGTGCCCG
TCCCTATAGATATCAGGGTGCAAAGGAGCTGGAGGCAAAAATATCACCTGCATCAATGT
AGTCAGCCCTAATTAGTATGATAGGAATTTCAATCAAGAACTTTAACAAGAAACCACATC
TTATATCCACCTGGGGAGCTTTAATAGGATAATGTTCAGGGAATTCGGCTTGAAGCTGA
TAAGTTTCATTAGCATACAGCGTCCCAGGAGCACCATTCACTTCAATTAACCACCTTTTC
AAAAATCAAAAGTTCAGTAATAATAGCATGGGACTTCGAATTCAATATTAGAAATTTATTG
GAAAACGACAAAAAACTTAACAACAAACAGGAAAAATGAAGACCTTTGAAGATAATCGG
AGGGTTCAAGATTGAAGCCAGACGGGGGATTGACCTGCCAGTTCCCTAGCTCTGTATG
GAGTCGATTGCATGCCAT
SEQ 38
CTGAAAGTTGGTTCCTTTTTTTCTTCTCTTATTTATTCATGCAATAAAGCATCTCCAAACT
TCTATTCTTATTCATTCTCTCTGCTTTCTTGCTTCATCGAACTGGTGAGTAGTTGTTTTGT
TTCCTTTTTCTTCTATTTAAGAAAAAATTAACTCTCTTTTTGTCGATATATTTTATCCTTTTT
TTTTCTTTTTTCTTTTTTTGTTTCTGTGGGTATTAGAGGTTTTGTGCTTCATTTCATATATT
TGTCTCATGATTTTACTACTTTCAAGGTTGGGCTTTTTCCTTAGCAAGAAAGAACTATTTC
TGTTTATGTTTCATTTTTCTTTTGGACCTTGGTTTTCTGTTCTCGAGGATTGTATCTGTTA
AAAATTGAAGTACTTTTTTTTCCCTTCATCTTTTTAATTGATGTTCTGTTTAGTGTTATTTT
CACCTTTTATGGCATTTAGCAATGTTTGTGCTTTGACGGGTTGCTGTTATAAACATAAAT
TTTGGGAAAATAATTACCAGGTAAACTTGTTATTATGCAAGTGCAATTTGTGTGCGTGTG
GTGGTTTTGTTGCTAGGGAGCAAGGCATGTGATTAGTGATAAGAGGGTTAAAAGGGGA
GTAGATAAACAAAGCTCCACTTTTTAGGCTATTGTTTTTACTTGGGTTCTTCCATTTTTTA
TTATAGCTTGATGAAGTAATATGTAGCTTATAAATTTCCCAGAATAAGAATCATCTCTTGC
CTTAGAAAAAATAATTTACCAGTAAGAGCAGAATATATGGTAGGATTCATCCACTCAACT
CCAATTAGTTTGTGACTGAGGCAAAGTTGATTGAGTGATCGATTGAGTTTAGTCTCATTA
GATTGTCATTTATCCATTAAAAACATGCAGCAGGCATAACATGAGTGATTTGATCTTCTG
AGCATTTTCTCTTGTTTGTTGAATTTAATATATCTTCACTAATTGCTTGGCCTAAATTTTAT
TAACTCAAAGTGATGATTTGCCTAGGTCAATATGGGAGCAAAAGCTTTTCTTGTCACCAT
TTTACTCTCATCGCTGTTATTTCCTTTGGCCTTGTCTACGTCAAATGATGGCTTGGTTAG
AATTGGACTGAAAAAGATAAAATTTGATCAAAACAATCGACTTGCTGCACGCGTCGAGT
CCAAGGAGGGCGAGGCTGTGAGAGCCTCTATTAGGAAGTATAATAACTTCCATGGTAAT
CTTGGGGCCTCTGAGGATACAGACATTGTAGCACTGAAGAACTATATGGATGCTCAGTA
CTTTGGGGAGATTGGTATAGGCTCTCCCCCTCAGAAGTTCACAGTCATCTTTGATACTG
GTAGCTCTAATTTGTGGGTGCCTTCATCAAAGTGCTACTTCTCAGTAAGTTATTTTTTTC
CTTAAAAGAATGCATAATAGAGAAAGCTAGTATTGGCTACATAATTTGATGATCATCAAT
ATTTATGTTTCTCTATGTTTGTGCAGGTTCCCTGTTTTTTCCATTCCAAGTATAAGTCAAG
CCAATCAAGCACTTATAAGAAAAATGGTCTGTTTCTGACCTTTGTCTATATTTGATAATTG
CAACACGACACGTGCTTTTCTCTTATACTTGTTATTTATGCTCAATGCTTGCTTGTAAGA
GAAAGCGTTCCATTATTGGCATTATACATGACATGTCTTAGGTTTTGAGATCAAAACTAT
TAACTCTGCTACCAACTTAGGATTTTTTTAAAAAGAAAATAAAGGAAACCCTCACCATTTT
TATTGTTGTCATCCAATTATGTGCCTTGTATCAAAGTTTTTTGTTGAAAAATATAATTTGG
CAAGTTTATGTTGTTGGCTTTCCCTGCCAAAAATGTGCTAATGTTATCTCTCTGATTTTTT
TTACTCATGATTTGCAATAAAAGCTTGTGCCTTTTAAACTGTTTTGTCTATCAAGGAATCT
GTTATGCTGGAGTTCCTTTATTGAGTTTTGATATCTATCATAATTTACTTTCCTGGAAAAT
TGATGTCTGCTGTGTGTTTGATATGACCTTTGAATATTCTTCTCTGTCGTTGAGTTGGTC
AACGTGTTCAATTGGTTGTTGACCTAAGAACCTGTTCATCCAAACCTTTTTCTGTTTAATA
TGCCATACAGGGAAGTCTGCTGCAATTCGTTATGGTACTGGAGCAATATCTGGATTTTT
CAGTCAAGATAGCGTTAAAGTCGGTGACCTTATTGTGCAAAATCAGGTGAATGTGGCTT
CTCACTTCCTTTTTTTTAATTTTTTTTTATGTTTCTTGAATATATGGTCTCTCATCTGTCGA
GATTGTTAATGACATCAGGAGTTCATTGAGGCAACAAGAGAACCCAGTGTGACTTTTTT
GGTAGCCAAGTTTGATGGTATATTGGGTCTTGGTTTCCAGGAGATTTCTGTTGGAAATG
CTGTTCCAGTATGGTATGTGGGTTTATTTTGTTTGCGTTCTCTTCTTTCCAAATGTTTCTT
CAATTTCCTATTAACCAAGTGCGTGCCTTGTGAATTTCATTATTATTGAAATGATTTTATC
TTCTGGATTGCAGAATTTCATGAACATTTTCTTCTATATAAAGTTTTAAGTGATACCGGTC
TTGACGGTTTCTTCTGTGTTTTATAGGTACAACATGGTCAAACAGGGTCTTGTCAAGGA
GCCTGTCTTCTCATTTTGGCTCAACCGAAATACAAAGGAAGACGAAGGGGGCGAAATT
GTGTTTGGTGGGGTTGATCCTAACCACTATAAGGGAAAGCACACCTATGTCCCAGTCAC
ACGGAAAGGTTATTGGCAGGTAAATATCCCTATATCTTCGGAAGATTGATGTTTTGCTTT
CTGCAACTGTTTTCTTACTCTTCAGAATATAATATGCAGTTTGACATGGGTGATGTTCTG
ATTGATGGTCAAGCTACTGGTATGTTACGTTACTTCCTTTTCTATTTTTTTGTGTGTGGA
GATTTCGAGGATATTGATGAGAGCACTTTCCCATGATTTCCCTGCTTTTTCGTTGTATTG
ACATACTGAATAATGTAGGTTACTGTGACAATGGATGTTCTGCAATAGCGGATTCTGGG
ACTTCTCTCTTGGCTGGTCCAACGGTATTCTCCAAAGCATATTCCACTTTTTGTCCCTAT
TATTCAGCTATTTTCAATAGTGAACTAGCTCAGAATATTTTTTGTACCTTCTTGTTCATGT
GTAGCTTCAACAATCTTCGAGCGATGAATAGGTTTAGTTTTTGGTTGGAATATCAGTTAA
ATAATAATCAGCCATTCCTTTGAACTTTTCTCGTTTTTTCCTTTTCCTATTCAAAAAAAGG
ACGACGGGAAGTGCAGTGGAATTGATGTTCATCCCAGTATCAGGACAAACTACCTTGTT
GATTGTCATACCTAAGAAATGTTTTTTTTTAACTTTTGCCTGTTGTTTCTGTCTTATTAAAT
TAATGCAACTTGAGAACTGCTTCTTTCTTCTCATCTTTAAGGCATGGTTGACAAATATGA
TACAAGGAAAAAGCTGCAGCTTTATTTGTCTAGACAATTGCAGTAGTGAAATGCTTTACT
ACTACATTTTCTAGTTCTCATCACTGTATCCTTCCTCCTCTATCTTGCAGACTGTTATCAC
TATGATTAATCATGCCATTGGCGCCTCGGGGGTTGTAAGCCAACAATGCAAAGCTGTTG
TTGAACAGTATGGACAAACAATAATGGATATGCTTTTAGCGGAGGTGAGCAATTAATTAT
TTTAGTTGATAGTTTGTTTTTGTTTTTACCAATAGTTTTCCGTGGTATCTGCAAAGAGGGT
GGTTTCGTGCTACTAGTTGCCTTCCCAATATTCTGATGGATTGGCGTCTTAACAGGCAC
ATCCAAAGAAGATCTGCTCGCAGGTTGGGTTATGCACCTTTGATGGAACTCGTGGCATT
AGGTTAGGCTAATCATTTCTTTCCTAACCTTGGCCAATCATTTGATATGTTAAATCCTATT
ATAAAATGTGTGCTGAGTGGATTTATGTCCTCCACGTGTAGTATGGGCATTGAGAGTGT
TGTAGATGAGAATGCTGGCAAATCTTCAGGACTGCATGATGCTATGTGCTCCGCTTGTG
AAATGGCGGTTGTCTGGATGCAGAACCAACTTAGACAGAACCAGACCCAAGAACGCAT
CTTGAACTATGTGAATGAGGTAAATAGCATCAGTCACATGCTTTCTCTTCTCATCTTAGG
TTAGATTACTGACCATCTTTAACAGCTTTGCGAGCGACTACCAAGCCCAATGGGACAAT
CTGCTGTTGATTGTGGAAAACTTTCTGGCATGCCTAGTGTTTCCTTCACAATTGGTGGC
AGAACATTTGACCTCTCTCCTGAGGAGGTATGTCTGATATCAATCTTCTGTAGTATACAT
GGTGTCTTCTCAACTTGTAAATGGCTTTTGATTCTTCTGAACGACGTGGTTGGTTGTAGA
ATCCTTTTGTCATGTTTCAGTTTGGCAGTTCAATTCTTTTTGGTTTTCACTAGATTAGCTA
GCAAGGTGTTACGCTGCTTTCAAGAGAAGTACACTTGTCTTGTAGAAAATTTCAACCAT
GACAGCTAAGTGTAGTTTGGATAATTAATGATATTGAATGTGTCGAGCTTCAATATCAGT
TTCTTTGCTTGATAAGTTAACTTATGATTGGATAATTAATGTCATTGAAGTGTGTCGAGCT
TTGATATCAGTTTCTTTGCTTGGTAAGTTCATATGATTGTACTAAGCTTGCATGCTTGTCT
TGTCACCAGTACATACTCAAGGTGGGCGAGGGTCCTGCTGCACAATGTATTAGTGGCT
TCATTGCCTTGGATGTTCCTCCACCCCGTGGACCTCTCTGGTATGTTTTCTTTTCGTCTT
AACACACGTGCAGATTCTGTTATTCTAGAAAAGTTATACCAGCTCCCTTTTGATAATGCT
GTTTGCTTATGGCTTTGGTGGTGCAGGATCTTGGGGGATGTTTTCATGGGTCGATATCA
CACCGTCTTTGATTTTGGCAAACTTAGAGTTGGATTTGCAGAAGCAGCT
SEQ 39
TCATATGGCTGCAGGTCTTCCATCTTTCCTAGGATCACTTACCGCCACAAGCATCCCAT
GAAAAACCCCGTTTTTATATTCTTTCCCGCTCCTTCTTCCCAACTTTAAATGAGAATTTG
GAAGGTTTTGAACAATTAGCTGACAGATGGCTCCTCCGTTATGTGCTTCGAGTTGATGA
CCCCTCTCTTCCAAGAAATGCTTTTTCTCATCCGATAGCTCAATGTGATCGCCATCGATG
CATGTCCAGTTCTCATACAGAACTACATTCGGAATTAGCTGCAAAAAGAGGAACACGAA
TCAATACTCGGGGTTTCAGAATTCGTCCGTATCAAGAAATACGTGAATTGCTCAGTAGT
GCTTCGCCACTACGCTAGCTGGCGGAAATAGCTTAATGGTAGAGCATAGCCTTTCCAA
GGCTGAGGTTGAGGGTTCAAGTCCCTCCGCTCCTGGCTTCGTCGTTTAGTGGTAACAA
GTTCCGTGCATAAGCCACTTTAGAGATAGGTGATCCTTAAAAATACTCCCTCTGTTCCAC
TTTATGTGAGCCTTTTCGGAGCACGAGGTTCAAATTGACCAATTTTCCTTGTGGATTGAG
ACATAGAATTTTCAAAAATTACTACATAAAAAGTACTATAAGTCATACTAATAGTTAACAA
TTCAAAATAAGAAAACTTTGTCTGACTCCCTAAATAGTAATAGATTCACATAAAGTGGAA
CAGAAGGAGTAATATACATTGCTGATCAGGCAAAGGGACCGACCTCGTGGTAGACTCT
TGGACTCTGCACTGCTGCTAAAGGATCCATTCCCAAGATGAAATGGTTGATGAAAACCT
GGACCACCGCGGGGATTATTTTCATGCCACCACTACCACCAATTACACCAGCCAACTGA
TTATCCTGTTAACAAGAAGAAGAAAGAATCAATAAAAGATATACTAAACAACAACTACTG
AGGAAGTTCGGATTGTCCATATACTAAGCAGTTAAGAAAGATGACGCATTGCTCAAAGG
ATCGTTTCCTGGATTGGATACCTTGAGAACAATGATTGGAGCCATGGACGACAACGGTC
TCTTTTTTGGTTGAATAAAATTAGCCGGGGCAGGAGGGAGTTCATCAGGGGATATCTCA
CTAGGTGTTGAGAAATCTCCCATTTCGTCGTTGAGTACAATACCAGTTGATGGAGAGAG
CACACCGGCTCCAAATGGATAGTTTACTGTGGTAGTTACTGATACAGCATTTCGATCAG
AATCTACAATACAAAAGTGACTTGTTCCGTGATCTCTTAGCTGACTCCACCTACAAATCA
AGGACCAAAACCGCTTTAGAGCCATTGGTGTGCAATCAATAGGCTTGTTAGTTCTGGGC
TCAGTCTGAAATACTCCTTCTGTCCCAATTTACGTGGCGGTGTTGGATTTCGAGAATCA
AAAAAGTTTTTCTTTGACTGCGATTTTTTCATAAGCCTTTTAAATATTTTGATTTAATTATT
ATTGTGACTTATAGTACTTTTTGCGTAGTTTCCAAAGATTTAAATTTTATTTCAAGACTAA
AAGATTCTATGTCCAAATTCATGGTCAAAGTTAACTTATTTGACTCTCGAAATTCACAAAC
CGCCACATAATTGGGACGGAGGAAGTAGAATTTATCTAACCTGGGCATATAGTATTCAG
GAGGAAAGGTGGTATTGTCGAAAATCTTCTGTCGAATTGCTTTGGCAAAAGATGGGGAA
AGCATGTCTGATACAGTTTTGCTGATATTTACAAAGTCGGGATCACCGAGGTCCATCCG
AAATGCAAACATGTGTTTCATCGCCTCAATTAGTCGATGCAGACCTAAAGAACCTTCTG
CAGCATTATAGCTTTCAAGGATTTTAAGAATCTGCATTTCCCCAATCGCAATGGTTTAGT
CAGACAATTGCGTTGTATTAAGTTTAGACATAATTGAGGAAGATTGGAACCAATACGTCT
ACGTCTGTGTTATTAGAAGGAAAATAGCAGTACAAGCTAAGTTGGTTTATATACATACCA
GAGAAATCCCCAGTGTTCCACTGGACGGAGGTGGCATTCCAACGATGGTGTAGCCCAT
AGCATTAACGGTAACTGCTTCTGGAGTTTCCACTTTGTAATTCCTCAAATCGTCCATTGT
CAAAATTCCACCCGCTTTTTTCACATCTTCGACAAGCTTTTCACCAACCTCTCCATTATA
GAATGCTTCAGGCCCTTGTTCAGCAATAAGCTCTAAGCTGTGGCTAAGTTTTACATTATG
GCAAATATCACCTGCCCGTAACAATTTCCCCTCTGGTGCAATTACTTGTCGTAAACCAG
GATCTTTAAGTATCAACTTTGCTTTTGACGCAATATGATGTGCAAGATATGGAGCAACCA
CGAATCCATCTCTAGCAAGTTTAATCGCTGGTTGAAATAGGGTCTTCCACGGCAACCTG
CCATGTTTTGACCAAGCGGCGTGAAGACCAGCTAACTCACCGGGAACTCCCATGGACA
ATGCTCCCTCTAACTTGGATTTTCCATTATTATCATACATGTTCTGCTTGAGGACAAACA
AAACAAATTCAGAACCTGCAACTTCGTGTTGTCTATGTTTATATACTAAATACTAATTCCA
ATTCCCAATAAGAGCAGAACTGCAGTTTTCTCATGTAGACAGCTACAACAGCTATTACTA
CTATGCCTCAATTCCAAGCAAGTTGGATCAGCTACATGAATCCTCACTGTCCATTTCGCT
TCATTAAGCCACAGTTTACTTATGCCGATACAAATTAAAGAATTTAACTTCTATACACTAA
TAACCTAATTGTATTTTACAATATCAGTACTTCAATCCAAAGCAAGTTGGGATCGATTATA
CGAATCCTTAGTGTTCATGTCTCTCCATTTGAGCCAAAGTTTACTTATGTCGATACAAAT
TAAAGAATATAAACGTAATACACTAACAACCTAATTGTCTTTTTACAATATCAGTACTTCA
ATCCAGAGCAAGTTGAGATCCGCAATATGAATCCTCAATGTTCATGTCGCTCCATTTAA
GCCACAATTTACTCATGTAGGTACAAGTTAAAGAATTTTAACTTATATACACTGATAATAT
AATTCTTTTATACAATATCGGTGTATTTAACTTGGTGTAATAGGCAGCGTGTCTTATTTTC
CACATTAGTATTCCCACTATTTATGGACGATTGCATGTAATTTTCGGTTAGGTGACCTGA
TACTGTAAAAATTCATTTCTCCAAATTAAATAGTTATTTGATGATGTTTGGATGAGTTGAA
ACTTGAATGAGAAAAAGCAATGCTAAACGAGTGAATTACGAACCTGTGAAGCAGCTAAA
GGAGCAGTTTCCCTCATATCAATAGCTTGAACTTCTGATGTTGATGAAGATCTAACAACC
ATAAAACCTCCACCGCCAAGTCCGCTGGCCATTGGATTGACAACTCCAAGGCAAAGTG
CTGTGGCAACTGCAGCATCAACAGCATGTCCACCAATTTTAAGCATGGATATACCAATT
TCCGAGCATCGACCATCATCAGCAGCAACAACTGCTTGCTCCGATTCAACAACGTCAGC
ATTTTGCTGCAGTTTTCCATTATATCTCTCAACATCTCCGATTAGCCAAATACCAACGTG
TCCATGGTGTCTAAGGCCTATAACTAAATTAAGATGGAGGAAAAAAAGGAACTTAAAAAT
CAAATGACAAAGAAGTGCAAATTGCAGGTGCTAAAATAATTGTGTAAGCTCGAGCAACT
TCTTGATTCTTATTTCAGAAGATAATTAGACAATCGATGTTAAAGGTAGGAATATACATG
CCAATTCTTTATATTTTTTATAATGGAAATATGCCCGAGAGCTAATGGCGCATTGTTCGA
AACTCAATGGATAGTGGGCCCGCTCCTCTAATTCTCACTTAAAGTAGGATTTTTGTCTAT
GACAATGTTCCACTGCTAATTTTGGTTTAAAAAAGTAGGAATGTACATGCCAAATTTTATT
TTTTGATAACCGACAAGCGATTATCAGAAAAGTGCAACCCGGTGCACTAAGCTTCCGCT
ATGCGCGGGGTCCGCAAAAAGGCCCTTGTGGTCTGGCCCTTTCCTGGACCCGTTGCAT
AGCGGGAGCTTAGTGCACTGAGTTGCCTTTTTTGGTAACCGACAAATCCCAGGGTCATT
AGCGTATTGTTCGAAACTCAACGGATAATGGGTCCGCTCCTCTAAATTCTCACTTAAATA
CTAGGATTTTTGTGTATGACAAGGTTTGAACCTGTGAAATGCGCACTCACACATCACAA
GTTGTGCTTTTACCACTAGACCAAAACCCCACAAGCTTGTACATGCCAATTTGCCAGGT
CAAATATTATCCAATTCAAGAAAGCCTGTAAATTTGACAATTTTTAGGCAAAAACCCAGA
ATTTGATTTTTTTTTAAAATATGTCCTTACGATAAAGGGTCAGCAAAATTTTACGCTCTAC
GGTAATTACTCAACAAATTCTTTCACAATTTCAAGATTTATAACATAACACTTCACTTCTC
TTAAGTAAAGCTAAAGAGAGAAATTCCTGTTAGGATCAAAAAGTCACGTGTCATGCGGA
AGCTAGTAACACAAATCTTGAACGACGATAAATCAAACAACAAAAGAGAAATATACCAAA
AGAGACACAAACATTTAACGTGGTTCGGTCAACTGACATACGTCCACGGCGGAGATGA
GCAATCCACTATATATAAAAGAGAGTTCAAAATATCGAGATAACAACCTCACGAAGAGG
CAAACACAAGTGATACACTAACATTTGTCCCGTAAAATTCTCCCCCTAAACACGACTCTC
AAACCTCATATGGCTACATCGTGGATGTTAGAGATAAAGTTCAATCTCTATAAGTTAGGA
TAGAAATCTCTATTAGTTAGGATAGCTATGTTCTGTTAGCTATATTTTAGGATATATGATT
GTTCTATTAGTTACCTTATCTCCCTAGTCTTCTATAGTGTGTTGTAGACTGTTGTATATAT
ATTCAACTATGTACTCAATAGAAAATCATCGAATTCTCTCAACATCATCTCTCATAATGCT
ACTGAATGGGAAAGAAAGATCTCAATTTATAGAAGTTCAAACATTTTTCTACCAGAAAAG
GGACTAGCCAACTATGGAAGCATTATATTTTCCTTCTAGGAAAAGAAAAACTGAATTATG
GTAAATATGTTGTTCTTTCCTCCGTGAAATAGGAAAATCAATTATAGTAAAAAAATCTAGA
CAAACACGTAACAATTCCATAATCATGGTGTTAATTAACTTCATTTTTCATAGCTTTTTAA
AGCCCAATTAACGAAATTCCTACAGAATTCAACTGAATATTCTGTTAACAGAATTGCAAA
TACTAAGAAAACAAAGAAGAAGACAAAAAGTCAAAGGTGAAAAACTCACATGAAATGGC
AGTGAGTGCAAATAAAAAGCAAAGAGCAAAACTCCATTTCTTCCTTCTATTGAAAGTAGC
AGGAGAAGGGTCCAACAATGGAGCTTCTAAATTCTGTTTACTCAT
SEQ 40
TCAGTTGTGTCCTGTCAAAGGATCTACTTTTATGCTTGTGGCAACAATTGGACTTCTAAC
CACATATTTACCTTCAGTTTCTACCCAGCTCAAAGAACCATAAACCACAATATCATCCAT
AACTAATGGACCTTCTATTCTTAGCTTGTAGCTCAACTTTTCATACTTCTCTTTGAAAACC
AACTTTTCAGGTACAAGATTAACTTTAAATTTACCCATTGTGGTCAATTTTGCTGTGTATA
CTGACATACCATCTCCAATATTAGTCACGGTCCTCTGGAATTCTTGTATCCTTCTAGGAT
CCGACTCGCTGCTGTTCCCATTGAAAAATCCAATGAAAGATGGATAGTTTAAGTCCAAT
GATGGGTTGGAGCAAGTATAAGATGAGGATCTTGTGATGGTTTTTATTTGTTTGGATGT
GAAGTTCAGAGCACAGAGAAGATTGACATAATCTTGTGGTGTCGCATCATAGATAAGTC
CAGGATCTAGTGCCTTGTTTGGATCGATATGGCCAGCTCCCATGGCTAGAGGAGTAGC
AGCAGCATTCTTACTACCTGTTGAGATATAATATAATTAAATGATTAAATATATGCTCTCT
CTAACATATAAGCTTACTTGATTCAACATAGTATCAGAGCATGCAAGAGGTCCTAGGTTC
AAATCTCACCGCCACCAAAAAAGTCATAAAATAATTCCAAGTGTTTGGTCCATGAAAAAA
AATCAAACTTTTAGATGAGATGGTCACACAATTCAATATTACCTATGTCTCGGATGGGAC
TTTGTGTGTTGTCCATCGCATTGGAAGTGGTCATCATGGCAGATCGGATGGCTGCAGG
GCTCCATTCAGGGTGTGCGGCTTTTAGAAGTGCTGCTACACCAGAAGCATGTGGACAT
GACATTGATGTACCAGATATAATATTGAAGTTACTAAAAAGTTTTCCTGAGGTAACATCA
GTCACTGGTGATTGTTGTGGCCATGAAGCTAGTATTAAGGCACCAGGAGCCATGAGAT
CAGGCTTGAGGATACTTGGACAGCTCGGTGACGGTCCTCTTGAGCTATAGGTAGCAAC
TTTTGGTGCTGGTTTAGCACCAATATGTGTCACTCGGAATTCAAGTTTTCCTTTAGGTGC
AGAGTTGCTCTTAATGTACTCTAGAACTTTATCACCCTCTTGTAAGTTCAAGAACACAGC
CGGGAATTCGCTTTGGAGGTAGAATTCCAAATCAGTTATATTAGTTATGAAGACAGCCC
CAGCAACTTTTGAATTTCTCACATTGTACACATGCTCACTGACCGAATCATTCTTGTCAA
GGCAGACAACAATATTGTGTGCACTTTTTTGCAGTTCCTTGTCATCTTGGCATTCAACAT
AGACAATGGAGCTTTCACTTGAACTAGAATTCCCAGGGTAGAGCGATAAGCCAGTGACT
GAAACTCCATTTCCAAGAGTTAATGCGCCAATAAATTCGCGGTCAACTGTGCCAGCTGC
AACAGTTAGCACCCAAGGTGTTCCATTGTGCAAAGTCTCATAATAAGGCCCTTCATTTC
CTGCAGAGGTGGAAACAAATATACCTTTCTCCAATGCAGCAAATGCGGCAATTGCCACA
GGATCTTCGTGTAGTGGAATCGCGTCTATGCCTAATGACAAGGATAAAACATCTACACC
ATCTGTAATTGCTTGATCAATTGCAGCAAGAACATCAGACAAGTATACACCTTCTTCCCA
TAGAGCCTTGTACATAGCCACATGAGCCTTTGGTGCTATGCCAATAGCAGTGCCGGTG
GCATAGCCAAAATAAGATGCACCCTCGACATAACTTCCCGCAGCTGTGGAAGAAGTGT
GAGTTCCATGTCCATCTGTATCTCTAGCAGAATTCATTGAAATGTTAAGATTTGGATTGT
TGGCAAGTAGGCCTTTATTGAAGTAACGAGCGCCAATGATTTTCTTGTTACACAAAGAG
GAATTGAACTCAATGCCACTTTCACATTCTCCTTTCCATCTTGATGGTACTTCACTAATC
CCATAATCACTATAGCTTTTACTCTCTGGCCATATTCCAGTATCAACTAAGCCAATTATG
ATATCTTTACCATAGTCGGACGTTGGCCATACACCAGACTCAGAGTTTAGGCCAAGGAA
TTGGGATGTGTGAGTTGTGTCAATTTTAACTGACATATCCTTAATTGAAGAAACATAACC
TGGAGAATTTTTTATGGCTTCAAATTCAGAAGGAGAAAGACTTGCACTAAAACCATTGAT
GGCATTAGTATAAGCATAGACTAGTTTTGAGGACAAGAATTCTTTGTGATTTGTACTACT
GTCTGATAAAGAAGCAAGTGTTGTCAAGTACCAATTATGATGGCTAGCAAAAGCTTTTG
GCATGGCTGACAAATCCATATGAATGATATATGTTTCTGGCTTTGCTAGTGAAATTATAG
AAATAAAGAAGAAAAGCAACCAAATACACAAGGTAATATGACTTGCCATGTTGAGTAATA
TATTGAAGGAGGATATTTTTTTTAACAT
SEQ 41
ATGGAATTTTACCAAAAACTGGCAACATGTTCTCATTTGTCGCTTTTGTGCTTCATCCTC
TTACATTCCATTCAAGTTCAAGGTAGCTACTTTGATCAAGAATATGGTAAGCAGGTACTG
AGCTCAGCAATACAAGATAAAGATTGGTTAGTATCCATAAGAAGGATAATTCATGAATAC
CCAGAACTCAGATTCCAAGAATATAACACCAGTGCTCTCATTCGTACTGAACTTGATAAA
CTTGGCATTTATTATGAATACCCTTTTGCCAAAACTGGTCTTGTTGCTCTAATTGGCAGC
AGTTCTCCTCCTGTTGTTGCTTTACGAGCTGATATGGATGCCCTTCCTCTCCAGGTTCAT
ACACAATTTTTTTACTATCAATCAATTATACCTCAATCGTCAATTAGTTGGGCAGTTATAT
GCAGTTCGGAGCTAGGTTGTTCCCTAAGGGGAATCAACATATAAAGAAGTAAAGACGAA
AAAGCCACGGAGATTCAATATATAGTGTATATACAAAAAAAAAATAAAAAAATTGACCTA
TTTACCCTGTGTAATTTTCGACCCAAAGGGTATCAGTTAACTCCCCTTGGATAAGGTTGC
TCTGCCCCTAGTTATATGAATCTTCTTGTATCTAATTGAGAGGATTCAATATAGTTAAATT
ATTTATGCACCGGTCGTCAACCTAGCACAATCCTCCAACTTTATTTGAATCTGCAACTGG
CTATGCTTTGTGAAGCTTAAATAGGTGTAGTTAGAAAGAAATATTCTTAATAGTGTGCAT
ATTTAGTTATGGAATGTCTCTAACATTATTCTCGAGTGAATATAACCATAGGAGCTTGTT
GAATGGGAGCATAAGAGCAAAGTTACTGGCAAAATGCATGGATGTGGACATGATGCCC
ACACGGCGATGCTTCTTGGCGCTGCTAAGCTGCTGAATGAGCGAAAGGACAAACTTAA
TGTAAGTTTGTTAACCTTACCCACTTCACTAATGCTGATTCATTTGGAATGTAATTTGTGC
TTGTGTGATTCTTTAACAAAAGATTTTTTGCACAATGTTGACCAATGACCAGATTGTCTT
GTTCTCAGAAGTAATAATATTAGGTTTGCGCTATAGTGATTATGCTGATCATTTTATCCG
TTGTGCTTTGACTTCTTATCTAGGTTTGCATGTACACTAGGCCTTTGGAGCTTATTCTAA
AAGGGGGTATTTCTTAAACATAGAGGACTGTAAGAAGATAGATGAAAACATTCTTTAATA
GAGGGGGGTATTAAGTGTACTTTGTCGAGATAATGAAAGAACAGACTCAAAAGGAATAG
ACCAAAAAGGATATCTTTTTGCTTTGTTATCAGATTTAGTTCACTTATTCACATGTCTCCC
TCGGAACAGTCCAAATTTCATAGCAGTGTCGCAAAAAAGGAATAGTTGTGCTGTTTGTT
ATCGATGATGCTTCTTAACTTGGATATGACCATGTTATTCTTTGATTCTTTAAATCTGAAA
CTTGGATCGTCCTTCTGTGGGTGACTAGCAGTGCCTGTGGGTAATCATTTTTGCCTTTT
CCTTAGATGAACATATAAAGTGATTTTGCCCATTGAACATAGTTGTGACCATTCATGATT
CATCAATTGTCTCGATGTGGAGAACCTAGCCCTCTGATCCTCCATGGCTTGCGAGTTCA
CATCCAGATGAAGCAACCAGAGAAACTAATTCAGGCATGACGAGAAATTTTCCGGTCAA
GAGAGAGGATCGATCAGAACCTGTTGAAGGAAATGGTAGATGACGGAGCATTGGCCCA
AATCAATTTCTCTCTGGAACCACGAAAAAGAAGCTGAGAAGACCGATAACTTCTATCTAC
ATTACAATAACAATACATGGCTGCATGTATAGGAAACGAGGAAACCATGAATGTTTTTTT
GAATTCTTTTTTGCTTGACCAATAAAAAGGAATTCAAGACTGAACCACACTTTCTAATTAC
TTGTTAGTCTGTAATTGTCTGACTGATACTATTAGATATTTCTTTTCAACTTTATAAGAATA
CATTTGTCACATGACACTCGTAAAGCACTGTTCGAATTGACTTAATCTGTTTTTGCCCTT
TGTGTGGCATCATTCATTATCTATCCATTCTTGGGGTAGTCTACAATAGAAAGTTGATTT
GTTGCTTGTCTCTATTTTTATTTTTTGAACCCGAAAAGGGAACGGTAAGACTTGTTTTCC
AACCTGCGGAGGAGGGAGGAGCTGGTGCATATCATATGATCAACGAAGGGGCTCTAG
GTGATGCAGAAGCTATATTTGGAATGCATGTTGATTTTAAAAGACCTACAGGGAGCATC
GGTACTAGTCCTGGGCCGATTTTAGCTGCTGTTTCCTTCTTTGAGGCAAAAATAGAAGG
AAAAGGTGGGCATGCTGCAGAACCCCATGCTACTGTGGATCCAATACTTGCTGCATCAT
TTGCAGTTGTGGCATTGCAGCAGCTCATCTCAAGAGAAGTAGATCCCCTTCATAGTCAA
GTATGTAGCCTAATCTCAATTAGAAGTATAAATCTTTGGTTTACACACACACAGAGACAC
ACAGACACATAATTATGTAGGTACATATATTCCCTTCAGGAACATTTCTTGTTTTAGAAA
GCAGTATAGCATTTGAGACCTGAAGCCTCATTGACAGTTAAGCTGACTGAGATTGAAAT
TCTCATTTCTGCCTGAAGGTTCTTTCTGTTACTTATGTCAGAGGTGGATCAGCATCAAAC
GTAATTCCGCCTTATGTTGAATTTGGGGGAACTCTGAGGAGTCTTACAACTGAAGGCTT
GCTTCAACTTCAAAAGAGGGTGAAAGAGGTAGGTTGCTTACATGAACCTTTGACTGTTG
TTGACTATCAACATCTGCACACTAGATTGTCTGCCAGATGTCTTCAACATGTAGTTTTCT
GTTAAAAAATTTAGTGATTTTTTTGAGTGATGTTTAATAGCCTTAAACTGAGCCTTCTTAG
GTACTGAGAGCTACGTAATCAAATTAATAAGATTAAGGGTGAATAATTCTCGAACACGTG
TTCACATGAATATAGAAGTCTCAGCTGAATGAATGATATAACTTGTGGTCTGCTTGCAAT
TTTCCCATGAAAATGCCATGTAACTCTAGCATTCATAACTGATCATCTTTCCCTGCTTTG
CTTCTCTTTCTTTGTCAAAATCAATTTTATGCCTGTCCTCAACATAGAAGCTTATCATTTT
TATTATTGAATCCTCTATTTCTATTTCGCATTGTTGAATTAGATGCTAATCGTCTTCAATG
TCAAGTATTGCGGCAAGATCTTACTAATTAATGTGAACAGAACCTAGATTTCTTGTGGCA
ATTTTGTGCATTTGTAACACATATTTACATGGAGCCTGCAGGTAATTGAAGGACAGGCT
GCTGTGCATAGGTGTAAGGCGTACATTGACATGAAAGAGGAGGATTTCCCAGCATATC
CAGCTTGCATAAATGATGAGCGCTTACATCAACATGTAGGGAGGGTTGGCAAACTCCTG
CTTGGTTCCGAGAACATCAAGGAAACTGAAAAGGTTATGGCAGGTGAGGACTTTGCCTT
CTATCAAGAATTGATCCCTGGAGTTATGTTTCAAATTGGAATCAGAAATGAAAAACTGGG
CTCTACCCACGCTCCACACTCCCCTCACTTCTTTCTCGATGAGGATGTCCTGCCAATTG
GAGCAGCGTTGCACACAGCCATAGCAGAGATGTATCTGAATGATTACCAACATCCCATT
GCGGTT
SEQ 42
TTAGATTTCCTCAACTCGTCTATAAAATAGGACATAGGCGGCCGAGGTTTTGAGCTTGT
CCTGGCTGATGGGATACACATGGCTGTCATCGAAGTCATACCACCGATCAGCACCTTG
CTAGATTATTAGAAGAAAAAAACACAAAGTTAGAATATCTGGATTAAACTGGGAAGACTG
TAAAAGTCTGAATATTTGACCTTCTTGCATATTCTTCATGATGAAGAAATAAAAACAATGA
AGATGCATGACCAAAGTTAAATATATAATAGATGCACATATGTGCAATATGTGATTAATTT
AGATGCAGATGATGCATTGGAACTAAAAAATACATCAAAGGAACACTCACTACGAAATA
GGAAGTTTCTATATTTGCCCTTGGAGGTAGGTTTCAGTGACCGCCCACCACCCACCCTT
CTCCCCAAGTACTGATCTTTAGATGCCAATTTTATCAGGTATAAAAGAATCCTATTTACC
ATAGAATAGAAACAAAACCAAGAAAAAGAAGCAAGGTAATCCAAGTCGCAGCACCACTT
ACATGAACAAACGCAGTGTAGTGACCCCCTCCCATGCTTCCATAATGGTTGCTAATTGC
ATAAAGCATATACCGGTAGGAAGATTTGCCATCTTTGTAGGCCAAATATGAGGATAAAT
CAAGATCATGAGTTGGGAAGTCAACATACGTCTCCAACTTGTTCTTCAGAAACCGGTTG
TACGAGAACCTCTTCAGGTGGATGACCAGAATCTCCGGCAGTCTCCAAAGATCCAACTT
TTTAGTAGCTTGGCGATGCTGCTTGCATGCAGGGCAGTACCTAATGTTGGATATAAGAC
AAAGAAAGTTAGGCAGATCATATTCATACTTCCCAAGCGAATGACACAAAATTAGATGAT
AAGATAGAATACTAGAAAGATTTCATGAAAGAAGTCTTTTCCCCCATGAGTGGCCCCAG
GTAAATAGCTGAATTTTATTATCTCAATTACTGTCTGTAGTTGCTATGAATATACAAGAAA
CAAAGAGCAACACAAAAACTATTTCAGAAGCACAATGTGCAGAAAATCAATAGGTGTTA
CATAAGATCATCAGATGCTGTCATTGTTTCTTTAACATAACTGAACTAGAAGTTGGAAGG
GTACTACTCATGCCATGTTGCAAAGTCAAGGTCCAATTTGGTTGAGGGGAGGCTAATAA
GAATGGTTTATCCACAATAAGCAATCACGACGTGGTGGAAAATATTGACAGAAATGAAA
TAAAATGGTATAATTGGAAAAATACAATTATGTAACTACAAAAGTTGAGGGTTTATAATAT
TAGCATAAACCAAAGAAGAAGCAAAAAGGGAAGCATTACGAGAAATCTCTGAACATTCA
TATGTTATGAATAGTGAATACATAGCTTGCATATGAATGGTGTACAATCACAGAAGTGAG
GGAGTTGCATGCTTACCACATATCTTCTGGCCCTAGAGGCTCTTCCTTCAGAAATGCCT
CAAGACATTTATACAGAGAGACAGATTCTTGTGGTCTTTTGGCAAAAAACCCAGATTTAA
AAACTTCTGGCAGTGAGCTGAAAAGGCCTGTATTGTACTGTTCAAGCATTTTAGGTGAC
CAACTTACAAGTACATTTAACCGTCCAGAGATATCTGTGGACTGTAATGGCTCATTCATT
ACAATCTCGGAGCCTTTAAAGGTTGCCTTATCATCTGATAGGTAAAATTCAAAGTCCATG
TCTAAAGGTTCGGCAGTATCTTCTTCAGCAATGCTTTCTGGAACCCCGTTAACTATTGAG
TTGCCAGGTTCCATGTCTGTGCTGACTTCTGAATCTGTACATACTTCAGTAGCACTTCTA
TCACAGTTAAGAGTAGCACTTCTATCACAGTTAAGATTATCTGCTTGGGCTGTAGTGTG
GACTAAGAATGGTGTAAGTATCTGTAGATAAAGACTACGGATATAAGATCCTGTAAGAA
CTCTACTATGCGCGGCAAGCGGAATTCCAAATGTCTTCATATTTGAGGTCAGCTTTCCG
TATATGTAATGCCT
SEQ 43
CTAGCTAACCTGGTTTTCACTAGCCTTGTAATACAGCATTTTCTGCACATAAAACATCAT
GTATCCTTGCGCAGCTCTCACAATACTCTCGCTCACCTGAGTTATCCAGGCATCGTCAC
ATTTGTACCATTGATTGCTTAACCTCAGATATGTTACGTAATGACCAGCATCAAGTTTAC
CAGTATGGGTGATGACAGCAAACAACTCAAATTCCGAGGACGATTCACAGGACGCATC
TTGCTCGTCCCCGTCAAAGGAGAAGATTCTATTTCCAAATCGACTCCTCAAGATAGATG
AAGAGAGATAAGGCGACATGTCCAAGGAAAAAGGAAACTGTAGGTAGTGATCAACCTT
CCTTGACATTTTCTTAATCACAGAATGCTCAAACCTTTTGATATGGAAGCAAGAAACTAA
AGGCAGTTTTCTTATGGACATCTGTTTAAGAGATTCCTGTCTCACTTGACAATGTTGGCA
GAAGAACTTCTGATCAGAACCCAATTTCTCAGGTCTTGTGAAATGATCTAAGCATCCCAT
CAACGTAGAAATTCGACCGTTTTGGCTAAACTTTCCAGATTCTGCCTCCTTTTTGTGAGT
ATTATGAGACTTCTTTGATGTCATCTTGGCGGAACTCCCCTGGCTCAGTTCCAAGTCCA
AGGAGATGTCTATACATGGATCATATGTAGTAGATGTGAAGCCACAAGCTGTACACATG
ACATCAGACCGCAAGATCCCAGAAAATACTCTATGAGCAATGCAACAGTCTCCGCTGCC
TGCACAAAAGAAAAAAATTAGTCAAGATTAGATTACAGATGACAAAGTGCAATGTGTACT
GCTCCTAATAAGTTACATACAGTAACATAGTATGCACAGCTTAAAGTGCTCCTCAACACA
TTTCATAAAAAGCAAAAGTCCAGTTATGCCATAAAGACAAAACAACAATGGTCCTATGAG
GAATGGCAACCAACAGAATGAGTAGCTACAAGCAATGGAGTACAATTGACTTTTGTAAA
AAAAACCTCAGTAAGAAAAGTATCCGCAAGACACTTTATTGCCTCAAAAGGTCTATTATT
CCATTTACACAAAACCATTCAAAATCATAGATCCTTGTATTCATTATTTAACTGCAACAAC
CAGGTGTTAACTAAATTTTGCAAACTCAGGGTAGCCCTGTACTAATCCTCTAATTAAGAG
GAATAAGAATAGGTGTTAACTCTCTCAATTAAAGTACGTGTGACTTAAGCGGGAATCAAA
TCAGCATATTTACAGTGGCAGAAATGAATTGTTTGCTAAGGAGTTACCCTACTAATGATT
GCTCTGCTAAAGAAATTTGAGGTACCGAGGAGGTAGACTCACAAGAATAATAAGACACA
CAGGGGCTTATAGAAAAAAGTAAGCAAAAAGTTGTCAACCTAGTAAAGACTTCAAGCTT
TCTTGAAGGTTGCGATCAGCTCACTCGAGAGTAATACCCTAAAACATGGTAAAAGTGCG
AGTTAATATGAGAACTATTGTACCAGAAGAAAACTCCTATGCTGAAATCAATAAGACTAA
CCAAACTGAGACTTACTGGGAAGAGTAGGAGGAAATCTTTTTCCTTTTGAGAAACATCT
CTAAGCCTGACAGCGAATATCAACTGGTAAATCGCCTATGGCAAAGAAAAGACCTAAAC
CATAACCTGCATTCAAATATTTCTATCTTTTCTCAGTGACAACGGAAGTTGGGATTGCCA
TGAGAGATGAGATGCTAGAACAACAAAGATAAGCCTATCAAGTAGGCCCTGAGTGCATT
TTAGTTAGACGTTACTTGACATCACAAAGATGCTTGAACACACTATTCTACTTCCTACAG
AAATTACTTTTTCCACCCCCTCTCCACCAACAAAAAAGTTCAAAAAATTCACCTACTGAA
GTACTTGACCTTTGCAAGTAACTATACAAATTTCAGTAATCCACTTATTTGAGGTTTTTAC
TGCACTAGCCTCCCTTGACTATGTTAGATTTATGTTGCTTTATTAAAATATGCATAAACAA
TGTTGCCAATAATTTTCACAGCACAATAAAAAATATTTAATCTCAATGATTGGTCTAATTC
GGAAGAAAAGGAAAAAAGAAAGAACAAGAAACTAACTATGCAAGGTGATGGGGGGAGA
AAAGATGGGTAACTAATAGATACTCTAACGCAACAAACAAATATACCTGGACTCAACGC
CTTTCCTTTATCGTTCTGCATCCTTTCATGAATCCCATCAAGCACGGAAATGAAAAACTC
ATGAGCATCCTGCTGTTCATAACTTGCAAGATTTGATGCATGCTTCCACCAACTGTTCCA
AAGAAAGGTTTACATCCATCAGAATCAGATACAGAACAGACTGCAATTAGATACTCAAAA
AAAAAAAAAAAAAAAANNNNNNNNNNNNNNNNNNNNNNNNNNNNNNNNNNNNNNNNNN
NNNNNNNNNNNNNNNNNNNNNNNNNNNNNNNNNNNNNNNNNNNNNNNNNNNNNNNN
NNNNNNNNNNNNCAATATAACAAATTACAAATGTATTATATCACAACCAAGTTACACACC
ACTAGCTAATTTTACTTCAATGAAGGGATAAGGGTGGTACATATAACCCCAACAATAAAA
AATTAATCTTGTCCCTACATCATTTGCAAATAAGGGCACAACCAAGCTAAATAAGGAATC
TTTTACCAATATATCATTATCCTTAAAAAAGAATTATAAGTATACAACAACTATGCCTCAA
TTCCAAGCAAATCTGGATCACCTATACGAACTTCTCACCCAAAAAAAAAAAAGAACGAGT
GCACATTATAAGAAAGCCAAACATGATCTCAACAATCCAAGAAAACATGATCAAATGCA
GACCTGTAGAGGAACTTTGCAGGACTAATAGGGGTCCAATCGCCGGAGAAAACAGCAG
AAAACATTGCATCCAAATCACAAGCTAAACACAGCATTGTTGAGTTCTTATTCCCATTAT
CACTACTACTCCTTGTTATAACACTGTTATTCTTTCGCTGGCAAAAATATCTGTTATGCTT
GTCACTCAGAAAGTAATTCCTCAATGGTGGTGTATGAAGCAATGCTTGAAGCACTGAAT
TCATAAAACACGTGTTTCCAAGATTGTTAAGGCCCCTCAAACCCCATTGTACTTCTGGG
GTTGTTGAGTCATTGCCGAGCTGACTCGGCAACGGACTCGAATTCCCAACGATCAAGA
CCTGCTCTTTCACATCAGGCGTCCACGGCTTATACTCCACGCGCCTCCTCTTGCGCGT
GTTCTCCGGCTGCGGCGGAGGGTCTTGTATTGATCCGATCACGGTAGCCTCCGTCTGC
GCTAGTACTACGGCGGCGTCGAAGTCTCGATCGTATACCTGGTCCCTACACCCGCAGC
AGAACAGCTCGGCCCTGTCGATGTCCACGGCGATGCTGTGCAGCGAGGGATCGGAAG
CGTTCCCCACCGGATGCGACGGCGCGTGCACACGGCAGAATACCGCGGCGCACGTGA
CGCAGGCGTACAACCGCGGCGGCGCCTGTCCGCACGCACCACATCTCACCAGCTCAT
TCGGCGGCTCACGGCGGATGGACGCACGCCCCAATGGCCGGACCTTCACGCAGCCCC
GGAAGTTGAAAAATGGGTTCGACCCAACTCTGGATCGGAGCTCCGACAAATGCTCGCA
TGTACCACTATCGGTATAAACAGGCGACCCGTTTTTATTTTCGGATCCGGGTTGGATCT
TACCGATTGACAAATGGATCTTAAGACTGTTCCTAGACAT
SEQ 44
TCAAGAACTGCTCTTCCTTCCTCCATTTATGAAGGCCTCAATTGGTTCGGCATGGATGT
GCTTCATTGCCTTCACTCCCAGCGGGTTGTCCTTGCTCTGTATCAACAAATGCAATCAC
GAGCATTGTTTAGAAAGAATGGCGAGCAACATGCTACAACCAGTTAAATTACACTGATA
ATATCAAAATTCTTTGGACGATCAATGTATAGAAATCAAACTTCTCTTTAGAAATAATAAG
TGCGAGTCACTTACTATTGAGCAGGTGCCTGCACGAATATTGCAGACAGGATAGTCGT
GTGGGCAACAACTGTAGTGATCTTCACAGCAAGTGGCTCCTTCAAGAGGGCAACATCC
CCAAGAAAAGCAGGAGTTATAGTATTCAAAGACACAACAGCAAGTGGTACCCTCGGGG
CATTGAGCATAATCATCACACTGAGTAGGTGGCTTGATTGGAGATGGAGGAGAAGGTC
CAGGTTTAGGGGGATTTACGCCTGTCTTGACTGGGTAAGAAGGCTCTATGGCTAATCCA
CACAAACCTTTAGAACTGGCAACGTTACGTTGAACCCGAAGGTAACCTTTCTCTCCCCA
GGAAGCACCCCAAGAGTTCCTGATAATCCAATAATCCATACCATTCTCACTACCATATCC
AACAGCAACCACGCCATGGTCCACTGCAGTTCCACATTTTCCAGTAAAGATACCCTGCA
AAATATATGTATTAGAACCATATAGCTACTAGCCAATAAGAACTTCATTATAATAAGATTT
AAATATAGAATTGTAAGTAGTGATAATTGGTAAATCATAGTTTTTGAATTATAACAGGAAT
CTATTAACTCATGCAGCCAGCGTTATCTTTTGCTACATTCTTTGGTCGAAACAAAACTAT
TATATCTGATCGAAAGGTAACGTATTACTGGAACGACGATGTCTTTCTTTGAATTCTGTG
ACTAACTAAAAGACTTCAGATTTTGCATGTTCACTTGTATTTATTACTTTCAGAAGAAAAA
GATAGGTCAATGCGAATAAAAACATTACCGATACATAGTGTTGAAAGTCGTGGCCACCA
GCTTCAATGGCAATGCTCACAGGTTGATTTGCAACAGCCTTTTGCAGTGCCTTTTCATTA
TTTGCAGGAACATCTTCATACCCATCTATGGTAACAACCTTGGCATTTTTCTGCATGACA
CAAATGTTTCAATAAATAAATATTCAACTCACTACATAAATCAATATATAAAGTGAATTTA
GTCATTTCAAGAATGCAAAATTTACCCTTGACTGGTCACATCTGCCATCACGGCCTGTG
TAAGGGTAGTCTTCCTCAGTGTCAATTCCTCCATTTTTGATGATGAAATCAAAGGCATAG
TCCATAAGACCGCCATTGCAGCCGTCATTGTAGGAAGTATCACAATCCACCAGTTCTTG
CTCCGATAGTGAAATCACATCTCCGGTGACTATCGAGTTCACTGCTTCAACGGAAGCAA
TTGCAGAGAATGCCCAACAGCTCCCTGGTTCATTAACCGATAGATTAATACACAAATATT
GAGCCATACAACATAAATAATGAATTGAGAAATTTGAACTCAGTGATTTATAAAAGAAAC
TGATATGCAGGCATTAATAAAGAATACACGTCAGTGTCACATGGTATTTAGAAGGCCCG
TCGGGTCACTTCGTGTAACATTTGAGCACATTAAGAGGTCGTTTGGTAGAATGTGTTAG
AGAAAATAATGCATGCATTAGCTTTGTGTATTAGTAATGCTTTGTTTGATACACTTTTTCA
ACCTATGTATAACGGATACAAGCATTAGTTATACAGTCTATTTGGTATTATCCTATGTATA
GCTAATGCATAGAAAACCATGACATTAGCTATATCGAGGCTATTAATACTTGCATTAGCA
TGGTTAAAGACAAAATTATCCTTAAAGTCCCTTAAGTAAAGAATATGGAGGGCATTTTTG
TAAACAATTAAATATCTAAAAAATTATGCAATGCATTTTAATTTTTAATACACCACACCAAA
CAATGCATAAAAAATAATCTCTGTATAACTAATGCTTGCATTACAAACCCCTGCATTACTA
ATGCACCTTATTTAGCATTATTCTTATACGCCCTACCAAACGACCCCTAAATGTTGTAGC
AACTAGCAAATATTCTAGTGCCAAAACTCAGCATCAATTGGTCAGCATTTTCTATCATTA
TCAAGTTGTGCTGTTAAGCTTTTCACCCTATAATAATTGCTCATGCGTATAGAAAGATGG
GGTCGGGGAATAATGACTAGGAAAAAAGAAAAGATGGGGTCCTGGAATAATATGATTAA
AAGGGAAATTCGGTGCCCTAAGCTCAGGGTATGTGCGAGGTGCGAAGAAGAAGTGGAT
CATAAGGATTTATTGTACGCGACCTTACCCTGCATCTTTCTATACACCAAAAAATGTAAA
GAATTGTTACATATTACTAGGTAAAATTTGATCTATAACAAATAACTCTTCATATATATAAT
ACCGGCATAGGACTATTTAAACAATAAAATAACAAACTGTTACACCCAATTAAATTACAC
TAATACTATAAAAAATTATACTATCAAAGTATAGAATTTAAACTCGAAGGAAATTGTAAAA
ATAGCACGGTATAGCCAGTTTTCGGATTGGTCATTCAAAAATAGTCAGCGTTTATCAAGT
CAATGAAAAATAGCCACTATTTTGCTGCAACAAAGACCGATCCAACATAATATACTGGAG
TTCGGTGCAACTGTGTATGAACTACAACATATTATGCTGGACCGATATACTTTGTTAGCT
CCAGTATATTACTGTAGCACCGGTGCTCCAAACTCCAGTATATTATGTTGGACCGGTAT
ACTTGATGGAACTCCAGTATATTATGCTGGAGTTCTAGTGCGCTTATGCAGATAGAGTT
CCAGCATACTTATCCTGGAACTCCAGTATAATATGTTGGAGTTCAAGTATACTTATGCTG
GAACTCCAGCATAATATACTGGCGTATTTTCTGAGTTTTAAACAGTGTTTTCGCTCAAAT
TTATCTTTACATAAAAAGTGGCTAAATTTCGATTACTTTTAAAATTTGGCTATTTTTGAAC
GACCAGCTATTTTTTATTTTCACACAAGGAAATCATAAAGGTATCCTACGTTTATGCGTA
GACACACAAATTGGCTTTCTACTCATAGAGGACTAGAACTGAACGCCACCATACTATTG
ACATGAGAGTTTATTTAAGTGCAATGAAAGTGTAAAGAACAGAAAAAATATTTAAATCTG
ATATAATAACATAGAAAATAATTCTTGATATCGATTCTAATCTAATAAAATAGGAAATAAT
AAATAACTAGTTATATTTAGAAACAATTTAACTTTAACGTTTTCATTTTATCTATTTTATCA
TTAGAGAGAAACTTTTATAATCACACGAATGTTACCCACAAATCTTTTGCCCTTGACCTT
TTAGGACCACATGATCAAAAGTTTTCTTTTCTTCTTTTTTTTTAAAAACTTTATATCAAGTC
AAATTATATCATTTAAATTGAAACGGGTAGAGTATTTATATATTTTAGCACAATAAGGCAC
GTATGATTTCCTTTGTTTGTCAAGTTCGTAGAAATACTTTCTACATATAAATTAATTATGG
TAGTGGAATACCAATAGCCTATCTCTATATGCTTTAATAACAAATTAAATCAGGAAAATAT
CATCTAAAACGCCGTCTAATTAATTATAGATCCATAACCCAAAAACCGGAGATAAACGAA
AAAGACAAAGCCATTGCTAATTAACTTACCACAGCTTCCTTGATCCTTAACTCCAACAAG
AACACCTTTCTCTCTCCAATCAACTGAGTCCGGCAAGCTATCCCCAACTTTAGGAAGAT
ACCGATCGCTTTTGTTTTTCAACAACCTGCGACGATCACTGGTCTTAGTACCTAAGTACA
TGGACCTGTACTCCTCGTTGGTCAGATCAGCAAATTTGGTTAAACCAAGCTTGTAACTC
TTGTTTGGAACGGAGTTTTGTTCATCGATGTATCTTAAGTTATCTTTAAAGATCTGAAAC
CGCTTGTCTTTTTCGTCTAAGGCGTTGTACGATTTTCCATGTTCGAGTAGCCATGACTC
GTACAAGGACATGACTTCATCGTCCGTTCGAAAGTGTTGGTTTTCGTCGTAGGTTAAGA
TGGACATGTCGGAAGCGGAAGATAAGGTGGAGAAGAAGAAGAAGAAGAGGAGGAGAA
GTAGGGATATGGATATGGTGAGAGTGGAGCTATGAGTTGCCAT
SEQ 45
TTAGAGTTCATCCTTAGGTGCTGTTGCAGGAGACCCTGTGGGGTTGCTTGATGAAGTCT
TGATGGGGTAGGATGGTTGCATTGCTATACCACACAATCCCTCTTCAGCATCAATCTCG
CGTTGCATCCTAATGTATCCTTTTTCTCCCCATTCAGGTCCCCACGAGTTCCTCACAATC
CAGTATTTGGTTCCATCAAGGGTTGTGCCATAGCCCACAATTGCCACACCATGGTCCAA
CTCAGTACCACAGTCTCCGGTGAATACACCCTGCCATATTTACAGTTCGTAAATGTTTAT
ACCTAGTAAAAAACTTTTTAACTTGAGATAAATGGTCTATCATCATTTACCTCAGAGTAGA
ACTGGAAGTCAGAACCTGAAGCTTGTATAGCTACAGAAACAGGCTGGTTGGCTACTGCT
TTAAGTAGGGAATCCTCATCATTAGGAGGAACATCCTCATATCCGTCAATTGATACCACA
GGAGAATTCCTCTGCCAATTCCATAAAATTCATGCACGTGGATTAGAAACAAGACTGGT
TCGATCTGACAGACTGACACCCTACAGATGTAACAGAATCTTACCTTTTGAATATCACAC
TCGCCACCTTCAGCCATGTATGGATAGTTCTCTTCAGTATTGATGCCTCCCTTCTTCTTG
ATGAATTCAAATGCCATGTCCATCAACCCTCCATTGCATCCTTGGTTTTGACTAGTGTCA
CAGTCAACAAGTTCTTGTTCTGATAAAGATACTAACTCATTTGTTTTGATTTGGTTTATCC
CCTCTACTGCAACGACAGTTGAAAATGCCCAGCAACTTCCTATAACAGGCAAAAGGTCA
GTTTCCATCAGCTATAATATTTTGAAAGAACATATCATATGGTTTACCCTTATGTTATTAT
GCTAGAGGTGTAAAGCGGCATAGAATTAATGACATGCTACTCTTTTCTTACCACATTTGC
CTTGGTCTTTGACAGGAGTAACAGCACCCTTCTTCCTCCAGTCAACAGAGGGAGGGAC
ATCTTCCACATTGGCGTACATGAAAGTTCCATTTGCTCGTGAAGCTCCAAGAAAAGAAC
GATGATGCTTAATCTTGGAACCAGCATAATGGTGTCTGAATTCATGGTTAGTCATGTCTG
CAAACTTGTTCAATTTCAACTTATAAGGCTTATCCTTCTTGTTGAAGTTGTGAACATAGTG
TACATTAGCCTTGAACACATTGAACCTCTTGTCTTTCTCATCAAGGCTCCTCGATACAGT
GTGATGGCTTCTCCATCTCTCATACAACTCCCACAATTTTTCCTCAGTTTCCAACTCCTT
CTCGTGGAAATCGAAACTCTCCCCAAGCCTAAGTACCAAAGCCAAAGAGAAAAGAACCA
GAAATAACTTCTTCAT
SEQ 46
AAAACCAACCTGTGAGACATTAACATCCAACTCTTGGGCAATGAAATGGGCAAGTTCTG
GAATGCGAGGCTTCAACTCTGAGCAGTTGACACTTAGTGACAAGTAAAATGTAATGAGC
CCAACTTTAATTTCCACTGCAAGTCGACATAAAAGATGAATGTGATTACAACCATAAGTC
TTTGTAATGGAATTATCTAATTTCAATAGCCATCATATCTGCACCGAAGCCTAGCTCAAG
TTTGTGAGAATAGATGTAGTGAAGTAGAAAAAGGGGACTAATACTTGCAAAACTAAATTG
AAATCTTGAAAAGTTTTACAGCAGATAAAAGTCAAAGCATTTGAGATTATGCAAACCATT
GAAGAGGTACATCAAATTGAAATAATACAAAACAGGGCTATGTTTCAACAATGCAAACA
GGAAATATTAGGCAGGAAAAATTTTGCGATTCTGTCATTACTTTAAGGTCTTGCCACAAA
TTTCTCATGCTTGTCGTTGTCCAGTCACAAAATTCACTAGAAATTTGACAATTGATTACTA
TAACTTAGTGGATGGATTTTCAGATAGTCGGTATATGGTCAATGCATGTTCACTTGGTAT
CAGTTGTCGTAGTCCTTAGAAATAACTTTTTGGTCCCTTGATTATACCATATTTGTACTTT
AGATCCCTCAACTATTCAGCTTTACACATTAAGCCTACAATTTAACGAACTTTACAGATG
TAGTCCAATAATAAACAAAACTAACTAACCCACGACATATTCATATTTCAAGTCTCCTTTT
TTAATAATACAAATTTCAAAAGGAGCATTAATGTTGTAAAAGTACCGTTGCCTACTAAAAT
ATCCCAAAAAGATGAACACGCTGCTTTGGAAATGGAACGCACCAATCACACGAGTTGC
GGATTAACAAAATCTAAAAATTCTAGTTCTAATTAAGATCTGACTAAATCTGCAAACTCGA
CAAATTAAAAGGCAGATGTCAAAGTCGGAGAGTTGGACTAAAAGTGGAAACAGGGGGA
TAACAGGGGACCAAAGATTTTCTCAGTATTCCTTGAAGTTATTATAATAAATTTCCAGTTT
AAGTAAATCTTTCTCAAACTACAAGAAGGCTGAGAATGCTGTGACATCAGTACAATTTTA
TGCAGGCAGTTGCTTCTTAGAAATTTTAAAATACCAGGGAAACAAGATGATTACAAGACT
AATTTCAGAGAAAGGTCAGATGTCAACTTGAATAGGATTATAAACAGGGATCTTTACACA
AATAGCCGGCTATATTCATGTTTACTTTTTCTAGCCATATACACAGATTATACATTGATGA
TACACAATTATGCACATATAATACATAAATTATGCATTCACACAAATACCAGCATTCTGGA
CATAAGAGACAGAATGTTGATTGCCCAAAAATGATCTAATCGAAGGCAACACATCAAAA
TCAGCATGATGCAATTCTAATTTTGATTCTCATTTTCATAAAAGAAACCACAAACCATTAT
AGTTCAAAATTGAAGGGAAAATTGAAAAGGGAATTGTATTAATCTATTAGAAAACAGAGC
TAGTAGAGATGCGAAAAATGAAACCAGTTCAGGTTATGACAGCATTCTAATGGGCAGAG
TAACCTTACAGTAAAAATACTATGTGAAGAAAAGCTGTCCCTTCATACCAGGTGTGTTGT
ACCCAGGGGGTCCACTAGGAGCTGATGAAGGAGACAGGTGCGCACTGGAGTTTGTGT
TATCCAAGCTTGAGACCGATGGTGAAGGTGGAGATGGAGGGGATAAATTGAGTCTGTC
CCATAACTCAGAACAATTAGTTTTCCAAAAACCAATTCTTTTATTTTCACGATCGTAAGTA
ACAAGAGTGTTGCGAACAACGATTCCTGTTGCAATTAAAAGCACGCATGTTACAGCACC
GAAGACCTAGGACGATGAACTTTGTCAAGTAGTTAGAAATACCTCCAAGAAGACTAGCT
GGATTCTTTCCATTCGGGAAAATTCCTAGGCAATAAGCACCACGTACTTTGAAGTGCTTT
ATAGCATACAAGTTACAATGAAGAAGGGGGAAATTAATCAATACTAAATCTTATAAAGAA
AAAGAAGCCAGTAGATGTGACGCCAAAATAGTGTCGGCAGATAGTTAAGAAAGAACTAA
AACAGAATAAAATGCCTACCTGAAACAAGTAATTTTCAGGAGAGAGAGTTAGTTTCTTTC
CATCGCTGAATACCATATCGACACGCGGAAAGTTCTTTGAGAGTTCTGATATGTTGCTG
GAATATATAAGACATTAAATAATAAGGGTAACACCAACAATAGGAAAAAAAAACAAATTT
AGACAAGAAAATCATAGACGTCTAATTAATTTTGGAACTCTCCTTATAAATACCTTCCAG
CACCAGAAAAGCAGATATCTTTAAAACTAGGATCTGGCCCTTCAATCTGTTTTAAAGAAT
GAAGCTCTTTCACTACCTGAAAAGAAAAGTTGAAGAGGTTAATCCCAAAAAGGAAAATA
CTTAAGTTTATCTAAAGATAATCGCCACAAGTTACATACTGTATAAATTCACAACCAGTG
ACTCCACTTTTCCTTCGCTAAATGTAACATAGCAAAAGCAATGAAAGACAACATCAAAGA
TATGCAGAAACTTGCAAGGAACTCTGTATATGTAGATAATTACTACCTGCTAACATCATT
GGAAGAAAATGTTGTGTGGTGTATTACCAAATTCAGAAGTTTAAAACAGGAAAAATCAAC
TATTATAAGTGGTTAAGCAATCTAATTAGGTCCTTTAATAGCAGAGAAACTAACAACAAA
AGAAGGGATAGAGGCCATAATATAGCCTTCCTTTCTTTTGATAAAGTACATAGCCTCCAA
CTCATCACAGGAATAAGTTAGGTGGCAGAGTTATAGGATCACAAGATACCTGGTTCTTA
CTTTTCTTCAAAAACATGTTCTAGATATCAAAGTGTTAGCTCTCAAACTATTATTGACCAA
GATGTTTTAGTTTCAGTCCCACTCATGTACAGGAATCTCCAACTATATATTTGATCCACG
TCACAATAGGACATGATGGTTTGTTTCACCAATCAGTGGTGTAAATAGAACTTTGAATGG
CAAGAAAAATTTAACAGATTGAGTTACATATAGAAAACACATTATTCAAATGAATATCTTT
TCACATCTAATTTCTTCTAGGACATTCTGCTCATCAATAGCGTGCTATTCGCCACTAGTC
ACTTTCTCAGACAGAACGAATCAAACAAACAGACAGAAACATTGGCAGATATGTAGATA
AACTATATCTTACAGCATTCTTGAAAGCTGCAAATGCTGCTTCTGGAAGGTACGCATAG
GTGGTACCACTATCAAGTATAGTCCCATGTTTTCCACCAAAAACCCGTGGATTTAGGTTT
AGCGGCTTCCCAGCGACATGTATCTCCTTCAGGTCAATATTGTAGTACGGGCTGTTGCC
ATCCGAGACTAAAGTAAATGCGTAAGATTTATCAAGTGTATTTGCTAGGAGGAGACCTA
ACATCACTGTGTCTCTAAACAATTGTTTCCAATACATACCTGTGACCAAAATCTGATTTG
GTAAAGGCCATGTCAGCAGGGGGTTTTACTCCACCAAGAACCATTGCCCCGCCACCAA
AATCCATCCCTCCATAGCACAAGGAGAAAGAATCACTAATTACATGTTTTTCAACAAGTT
GATCAACTATACTAAGATCACCTCGGCCCAAACCCATTATACCATCAGCACGTTGGCTG
TAAAGATCACCAGTTTCCGCAATTTCACATCCAAAAACAGCTCGTTGTGGTGCAAGCTC
ACTTAGATTTCCAAAAGATATGATGTCCTCTCCAAGCAACCCATAACTTGCACTCATCTC
AGCGTACCGTCTCTCATAAATACATTGCTGCCTCTTATGGTCGCAGGGACAAGCCTTAT
TGCATTTCACAGATTGATAAGTGCTTGACATTTCCGGCTGAAACTTAGGATCCTAAATAA
GACAACATACAGAGTACCACCGATCAAAAGACAAAAATCAAATGCCAAGCAATTCTAAG
TGCTATATTAAGCATTTCTCACAAAATTAATAGGCTGACTCAAAGTAAAATTACTAGTCAT
GAAGTTTCTTAAGTGCTGATATTTTCTCCATTAGGAGATCTTTTATGATTACAAGGCAAAT
TGAGCAAGAATCACATTTAAAACATCATGAAACTATACAATGGATTTGTACAGCTTATCA
ACAAAGAGAGGCTTAGAACTATTTGTATCCTAGTTAGATTGGTTTGTTCTTGTTTACCCT
CTTTCCCTTAATACTTACAAATAACTGCATCCTACTAAGCGATTTCCTCACAAACAAAAA
GTATATTAAGTAATGTTTATGAAATAGCACCTATACATAAACAGTTTCAAATTTTAATTTC
CATATCAAGCTATCAAAACACACTAACTGCAAAATTAAGATAAATATGTAACCTTTAATGT
TTATCCAGAAAAAGAAAAGAGGGAAAAAACCTGATGGTTGCCACACTTTTTACACTCAG
AGCAAGGGACATAGGTAACTGTACTCCCTGTATCAACAATAAGAGCGAACTTCTGCGGT
GGTGTTCCAATCCAAATATGAGTTGTATAGTATCTGCATCACAAGTTACTTGGAATCCAT
TCAACAAAATAAAAATTACTAATAAAGAAATTAGTCTGAACTAGAGGTATATAGAAATATA
TTCCACAGTGAAAACGCAAAATACGCATGTGAATCAGCAGCCAAAAGAGTTAGTAACAG
TGAATTTAAATTTTCTGAGCAAAAGCTACGAATTTGAACCCGTTGAGGAGGAGATCATCA
TGGAGAGACATGCGAGCGCTGGCAGGACTTTTCTGGAGGTGGCGACGGGAGATTTCC
GCACGGCGTGAAGTGTCTTTCGGAGGAAAGAGCGGCAGCAGCATGGTTGTGTGACGG
CTGCCGTCGGCCGGCGAAGGGAGGAAAACGGAGCTGCCGTTAGTAACATCAGATAAT
CGGAAGCCGGAAACGACACCGTAATGGATCAACAGAGAGATGATCGCGAGAATAACGG
TGAACTGTGGCCGTGCCAT
SEQ 46
TCAATATTGTAGTACGGGCTGTTGCCATCCGAGACTAAAGTAAATGCGTAAGATTTATCA
AGTGTATTTGCTAGGAGGAGACCTAACATCACTGTGTCTCTAAACAATTGTTTCCAATAC
ATACCTGTGACCAAAATCTGATTTGGTAAAGGCCATGTCAGCAGGGGGTTTTACTCCAC
CAAGAACCATTGCCCCGCCACCAAAATCCATCCCTCCATAGCACAAGGAGAAAGAATCA
CTAATTACATGTTTTTCAACAAGTTGATCAACTATACTAAGATCACCTCGGCCCAAACCC
ATTATACCATCAGCACGTTGGCTGTAAAGATCACCAGTTTCCGCAATTTCACATCCAAAA
ACAGCTCGTTGTGGTGCAAGCTCACTTAGATTTCCAAAAGATATGATGTCCTCTCCAAG
CAACCCATAACTTGCACTCATCTCAGCGTACCGTCTCTCATAAATACATTGCTGCCTCTT
ATGGTCGCAGGGACAAGCCTTATTGCATTTCACAGATTGATAAGTGCTTGACATTTCCG
GCTGAAACTTAGGATCCTAAATAAGACAACATACAGAGTACCACCGATCAAAAGACAAA
AATCAAATGCCAAGCAATTCTAAGTGCTATATTAAGCATTTCTCACAAAATTAATAGGCT
GACTCAAAGTAAAATTACTAGTCATGAAGTTTCTTAAGTGCTGATATTTTCTCCATTAGG
AGATCTTTTATGATTACAAGGCAAATTGAGCAAGAATCACATTTAAAACATCATGAAACT
ATACAATGGATTTGTACAGCTTATCAACAAAGAGAGGCTTAGAACTATTTGTATCCTAGT
TAGATTGGTTTGTTCTTGTTTACCCTCTTTCCCTTAATACTTACAAATAACTGCATCCTAC
TAAGCGATTTCCTCACAAACAAAAAGTATATTAAGTAATGTTTATGAAATAGCACCTATAC
ATAAACAGTTTCAAATTTTAATTTCCATATCAAGCTATCAAAACACACTAACTGCAAAATT
AAGATAAATATGTAACCTTTAATGTTTATCCAGAAAAAGAAAAGAGGGAAAAAACCTGAT
GGTTGCCACACTTTTTACACTCAGAGCAAGGGACATAGGTAACTGTACTCCCTGTATCA
ACAATAAGAGCGAACTTCTGCGGTGGTGTTCCAATCCAAATATGAGTTGTATAGTATCT
GCATCACAAGTTACTTGGAATCCATTCAACAAAATAAAAATTACTAATAAAGAAATTAGTC
TGAACTAGAGGTATATAGAAATATATTCCACAGTGAAAACGCAAAATACGCATGTGAATC
AGCAGCCAAAAGAGTTAGTAACAGTGAATTTAAATTTTCTGAGCAAAAGCTACGAATTTG
AACCCGTTGAGGAGGAGATCATCATGGAGAGACATGCGAGCGCTGGCAGGACTTTTCT
GGAGGTGGCGACGGGAGATTTCCGCACGGCGTGAAGTGTCTTTCGGAGGAAAGAGCG
GCAGCAGCATGGTTGTGTGACGGCTGCCGTCGGCCGGCGAAGGGAGGAAAACGGAG
CTGCCGTTAGTAACATCAGATAATCGGAAGCCGGAAACGACACCGTAATGGATCAACA
GAGAGATGATCGCGAGAATAACGGTGAACTGTGGCCGTGCCAT
SEQ 47
ATGGGAGCAAAATCTTTTCTTGTCGCCTTTTTCCTTTCATTGCTGTTATTTCCTTTGGCCT
TCTGTACATCAAATGATGGCTTGGTTAGAATTGGTTTAAAAAAGATAAAATTCGATCAAA
ACAACCGACTTGCTGCACGCGTCGAGTCCAAGGAGGGGGAGGCTTTGAGGGCCTCTT
TTAGGAAGTATAATAATCTCCGTGGTAATCTTGGGGCCTCTGAGGATACAGACATTGTA
GCACTGAAGAATTATATGGATGCTCAGTACTTTGGGGAGATTGGTATAGGCAGTCCCCC
TCAGAAGTTCACTGTCATCTTTGATACTGGTAGCTCTAATTTGTGGGTGCCTTCATCAAA
GTGCTACTTCTCAGTAAGCTTTCTATTACATTTTTACTGTCATAAAACATAACAGAGAAAG
CTAATGTTGGCGTATGCATAATTGACGAGCATCCATATTTATGCGTCTCTGTATTTATGC
AGGTTCCATGCCTTTTCCATTCTAAGTACAAGTCAAGCCAATCAAGCACTTATAAGAAAA
ATGGTTTGTGTCTTGACCTTTGTCTATAGCTGAAATTGCTGCATGAAAACATGCTTTTCT
CTTAAACTTGTTATTACGCTCAATGCTTGCTTGTAAGAGAAAGTGTTCAATTATTGCGTTT
TGAGATCAAAACTGTTAACCCTGCTCCCAACTTAGGAGATTTAAAAAAAAAAAAGAAAAT
AAAGAAGACCCTTACCATTCTTATTGTTGTCATCCAATTATGTGCCTTGCACCAAAGATT
TCTGTTGAAAAATATAACATGCGAGATTATGTTGTTGGCTTTCCCTCCCAAAAGATGTGC
TAATGTTATATCTCTGATTTTTTTCTTTCAATTATTGGCAATAAAAGCTTGTGCCTTTTGAA
CCGTTTTGTCTATCGAGGAACCTGTTATGGTGGAGTTCCTTTATTGAGTTTTGGTATCCA
TCATAATTTACTTTCCGGGAAAATTGGAGTCTGCTGTGTGATTGACATGACATGATTTTT
GATTATTCTTCTCTGTCTGCTTTCTAAGTTTCTACATTCTCGGTAGAGGTAAGATATGCG
TACTATCTACCCTCCCCGGACCCCACTTATGGGACTAGGTTTTTTTTGTTGTTGTTGTCG
TCATCTACTTTCTAAGTTGGTCAACGTGTTCACTTGGTTGTTGACATAAGAACCTGTTCA
TTCAAACTTTTTTCCTGTTTAATATGCCATACAGGGAAGTCTGCTGCCATACGTTATGGT
ACTGGAGCAATATCTGGATTTTTCAGTCAAGATAGCGTTAAAGTTGGTGATCTGGTTGT
GAAAAATCAGGTGAATGTGGCTTCCCACTTTGTGTGTGTGTGTGTGTGTGTGTTTTAAA
ATGTTTCTCGAGCATATAGTCTCTCATCTTGTTAATGACATCAGGAGTTCATCGAGGCAA
CCAGAGAACCCAGTGTAACTTTTTTGGTAGCCAAGTTTGATGGTATATTGGGTCTTGGT
TTCCAGGAGATTTCTGTTGGAAATGCTGTACCAGTATGGTATGTGGGTTTATTTTGTTTG
TGTTCTCTTCTTTCCAAATGTTTCTTCAATTTCCTATTATCCAAGTGCGTGCCTTGTGAAT
TTCATTATTACATTGAAATGATTTTATCTTCTGGACAGAATTTCATTAACATCTCCTTCTG
TATAAAGGTTTAAGTGATACTGGTCTTGACAGTTTCTTCTGTGTTTTATAGGTACAACAT
GGTCAAACAGGGTCTTGTCAAGGAGCCTGTCTTCTCATTTTGGCTCAACCGAAATACAG
AGGAAGATGAAGGGGGCGAAATTGTGTTTGGTGGGGTTGATCCTAACCACTATAAGGG
AAAGCACACTTATGTCCCAGTCACACGGAAAGGTTATTGGCAGGTAGATATCCCTATAT
CTTTGGGAGATTGATGTTTGGCTTTTGCAACCGTTTTCTTACTCTCAGAATATAATTTGC
AGTTTGACATGGGTGATGTTCTGATTGATGGTCAAGCTACTGGTATGTTATGTTACTTCC
TTTTCTATTTTTTTGTGTGGAGATTTCGAGGATAAGATGAGAGCACTTTCACATGATTTC
CATGCTTTTTCGTTGTATTGACATACTGAATACTGTAGGTTACTGTGACAATGGATGTTC
TGCAATAGCGGATTCTGGGACTTCTCTCTTGGCTGGTCCAACGGTATTCTCAAAAACAT
GTTCCATTTTTTGTTCCTCTTATTCAGCTATTATCAATAATGAACTGTCTCATAATTTTTTT
TGTACCGTCCTGTTCATGTGTAGGTTTAATTTTTTCGCTGGAATATGAGTTGAATAATAA
TCAGCCATTCATTTGAAGTATTCTCATTTTTTCCGTTTCTATTCAAAAAAAAAGGAGGATG
GCAAGTGCAGTGATATTGATATTCATTCCAGTATCTGGACATACTTCCTTGTTGATTTTC
ATACCTAAGAAATGTTTCTTTTTACTTTTGATCTGTTGTTTCTGTCTTCTTTGTGTGCTCTT
CTTCTTTATTAGGAAAAAAATTGTGCATCTTGAGAACTGCTTCTTAATTGTTTTCTTTTAT
GGCATGGTTGACAATATGATACAAGGAAAAACTGCAGCTTCTTTTGTCTAGACAATTGTA
GTAGTGAAATGCTTTACTACTACATTTCTAGTTCTCATCATTCTTCCCTGTATCCTTCCTC
CTCTATCTTGCAGACTGTAGTCACTATGATTAATCATGCCATTGGCGCCTCGGGGGTTG
TAAGCCAACAATGTAAAGCTGTTGTTGAACAGTATGGACAAACAATAATGGATATGCTTT
TAGCAGAGGTGAGCAATTATTTGTTTTAGTTGATAGTTTTTTGTTGTTTTTACCAATAGTT
TTCCGTGGTATCTGCAAAGAGGATGGTTTCATGCTACTAGTTGCCTTCCCAATATTCTGA
TGCATTGGCGTCTTAACAGGCACATCCAAAGAAGATCTGCTCACAGGTTGGGTTATGCA
CCTTTGATGGAACTCGTGGCGTTAGGTTAGGCTTCAGACCCTTTCTTTCCTCGCCTTGG
CCAATCATTTGATATGGTAAATCCTATTATAAAATGTGTGCTGAGTGGATTTATGTCCTC
CACGTGTAGTATGGGCATTGAGAGTGTTGTGGATGAGAATGCTGGCAAATCTTCAGGA
CTGCATGATGCTATGTGCTCCGCTTGTGAAATGGCGGTTGTCTGGATGCAGAACCAACT
TAGACAGAACCAGACCCAAGAACGCATCTTGAACTATGTGAATGAGGTAAATAGCATCA
GTCACATGCTTTCTCTTCTCATCTTAAGTTAGATTACTGACCATCTTTAACAGCTTTGCG
AGCGACTACCAAGCCCAATGGGACAATCAGCTGTTGATTGTGGAAAGCTTTCTGGCAT
GCCTAGTGTTTCCTTCACAATTGGTGGCAGAACATTTGACCTCTCTCCTGAGGAGGTAT
GTCTGATATCAATCTTGCGTAGTGTACATGGCGTCTTCTCATTTTGTAAATGGCTTTGAT
TTTTCTGAACAAAGTGATTGGTTGTAGAATCCTTTTGTCATGTTTCAGTTAGGCAGTTCA
TTTCTTTGTGGTTTTCACTAGATTAGCTAGCAAGGTGTTACTCTGCTTTCAAGAGAAGTA
CACTTGTCTTTTAGAAAATTTCAACCATGACAGCTAAGTGTCGTTTGGATAATTAATGAT
ATTGAAGCGTGTCGAGCTTTAATATCAGTTTCTTTGCTTGATAAGTTAACTTGTGATCGG
ATAATTAATGTTATTGAAGTGTGTCGAGCTTTGATATCAGTTTCTTTGCTTGATAAGTTCA
TATGATTGTACTAAGCTTGCATGCTTTTCTTGTCACCAGTACATACTCAAGGTGGGCGA
GGGTCCTGCTGCACAATGTATTAGTGGCTTCATTGCCTTGGATGTTCCTCCACCCCGTG
GACCTCTCTGGTATGTTTTCTTTTCGTCTTAACGCACAAATGCGTGGATTCTGTTATTAC
CAGCTCCCTTTTGATAATGTTGTTTGCTTATGGCTTTGGTGGTGCAGGATCTTGGGGGA
TGTTTTCATGGGTCGATATCACACCGTCTTTGATTCTGGAAAACTTAGAGTTGGATTTGC
AGAAGCAGCT
SEQ 48
ATGGTTGTTGCATTTGTGGGCATAGCCAAGTCTATCGGGCAACAATGCTTGAGGCGATC
AAAACCCTACTCTTACTCTTACTTCTCCAGCTATGTTCGTTCCTCAAATTCTAAGTATGG
ACTCCAAAATTGGCAATTTCAGAGTCATAGAACTCTAATTTTACAATCGGCTTCTGAATC
CGTCAAATTAGAAAGACTCTCCGATTCCGATTCCGGTAATTCCACTCACTTTGTCCTATT
TTACGGCGTACTGTTACTATTTGGGGAATCAAACTTCTTTTAATTTTGGGTACAATTGCT
TTCTGGGGTTAATTAACAGGGATTTTGGAGGTTAAATTGGATAGGCCCGAAGCGAGAAA
TGCAATAGGGAAGGATATGTTAAGAGGATTACAGCAAGCGTTTGAAGCCGTGAGTAATG
AACGTTCAGCAAATGTTTTGATGATCTGCAGTTCGGTTCCCAAAGTGTTTTGTGCTGGA
GCTGATTTGAAGGTATAACAGCTTCTCTTCATGTTGTGTTTTTAGGAAAAAATGAGGCAA
AAAAAAAACTTTTGAAATCTTGTGCAGAGTATAGGACACACTATTTGGTTAACAAAAAAT
GTGTAATCAAAGGGTTCGAAGTCAGATTAAATAACAAAAATTATGGGTAAATATTAAAAA
TTTTAAAACTTTTAAAAAATCATACTCGTTCAAATTATATTAAATTTTTTCATTTCTCCTCTT
TGCTTCTTCTTCTCCTTCTTTCTTCGTTCTCCTCCTTAATTTCTTATTTCTCTTCAACTTTC
GTTGTTGTTGCTGCTGGTTCGTCCATGTCATCTTCTTCTTCTTCATTTTATTTTTCCATCT
TCGTCTCATTTTCATCTTTCTTCTTTTTTTCATTTTTTCTTTTCTTTCTAGTGGTTTAAAATA
TACGAGAAAAAGAGAAAAATATGAAATTTTACAAAGTAAGTATTTTGCAAAATACCCTCG
AGATATTTTGAGACATACCCATAAATGAGTATTCTACTGAAACATCCCCGGGTTGTTGTT
TGAAACATCCTACGGGATATTTCTTCTACTTCTTTCTTTTTTTCTAGTGTTGTTCTCATTG
ATCTTTTTTTCACAGATGTTTCAAACGTTCCCACAGATGTGTGCAGATGTTTGAAACATT
TCAATAAATGTTTGAAACATTTCTTTAGATATTTGAAACATCTTTCCTAAATGTTTGAGGA
TTAGGAGTGGCGGGGATAGAGAGAGGAGCGTTGCGAGATGGAGTAACAAGGGGAGGA
GGAGGAGTGGCGGGAGGAGGAGGAGGGTTTTTTTTTTTGTAAATAAGAAAACTTTGGG
GGTTTTAAAAATAGTGTCATTAACCCTAATCACAGAAGTGTCCCTTTTACCCCATTCTTA
ACACTTTTGTCTTAAAAAGTGATATAAGTTTTGAAGTGTCTTAAAAATTTAAATGCCCCGT
GTTTTTAGTTGTAATATGTTTTTTCTTGCAAGCAGTATCACAACTTGTAGATATTACATCT
TCCTTTTCGTTATGTATCCTCTTCTCTTCATTGTGCCAACCATTGTATTTGTGTTTTCAAG
CAAGAGACAGATCCAAGATATGAACTTTATGTGTTCGAGTTCTAAATTCTGCCTAGTCCA
TTTGATTTACGGGGTTTGAAATCTATATTTGTACAAGTTTTGGTGAGTTTTTTAACACATA
TATGTTTCGTTGATTCTCTCTGTAATGTCTTGTTGTCTTCTAGTATATTTTTCTTTTGTATC
GCGTGACATGTTGACAAGAAAAACAATAAAATTTCACAAGCTAGGAGCATCTGCCAAAC
ATACAACTTTCAATGTTGAAAAGTTTCTCTGTGGTTTGATCTCTTCGCTTGTGCAGCCTC
TGTGGGACTCAAACATCTTCACAGATTCAATTTTCTTTTGTGGGGACTGCATTTATGATT
GGCATGGCATATGATTGAATAGCTGATGTTTTTGGTGTCAGATGTTGATTTACGCACTTT
AGTAGTCTTTCTACTGTTTGTTATCTGTGCTGTATTTTGTACCTACTGATAGCTAATTCAA
TTGATTGGCATTTGCTACATAGGAACGAAAAACTATGATTCTTTCTGAAGTCCAGGATTT
TGTAAGCACTTTGAGATCAACTTTTTCCTTTTTGGAGGTACGTGATTTTTATTGATGTTTT
GTTTAATATATTAAAGATCATAGTGTCTTAAAGCTCAAGAAGAAGTTTTTTTTATCAATTT
ATGAAAAGCAGAAGTTATCAGTTTATAATCTTCTGAATTCTTCCTTCAAAATGATTGGTTC
ATGAGATCATACTATGTCTCGTTTCTTCTTCCTCACTTATTACTTTATCAACCATAAAGTG
GTCCAGTTGTACATATCCTCTTCTTTTCTTTCACTCTATTTGAGTAAATATTTTCTTGCTC
AGGGTCTTCATATTCCTACAATTGCTGCCATTGAAGGTATAGCATTGGGTGGGGGGCTT
GAAATGGCGATGTCTTGTGATATCCGTATATGTGGTACGTGCTTTCTTGCACTTCTGGG
TGTACCATATTTTCTCCTTCTTGCTCTCTAGTTTGATAATGTGTTAACAGGTGAAGATGC
AGTGCTGGGCTTGCCAGAAACAGGACTTGCTGTAATACCAGGGTAGGTATGCCTTAATT
ACGCATTATATGTTTGCTTATGCAAAATCCCAAAATTCTTTGAAGGATGTGTTAGCTATG
TGTGGTTTATTTCTAAATTTATCAGATCAGTGGGACGCATTTCCACTATCTTTTTGTCACT
TTGTAATCTTTTACTATTCAAAGGTTTCCAACTTCAGAAGTTGCTATAAATACTCTGTATG
CATAGATGATCTTCTTAATGGTATCCTCTTATTTCATACTGGCATTGTGCAGAGCAGGAG
GAACACAACGGCTTCCTAGATTGGTTGGAAAATCAATTGCAAAAGATATAATATTTACTG
GCCGAAAGATAAGTGGGAAAGATGCTGTATCAATAGGTACGTGTATGACTTGTCAGAGC
TCATTTGTCAAGAGACAGGACTCCTTTGTCTTTCCAAGTTCTCTCTTGTTAATATAAAGAT
AGCAGTGATGTCAGCACTTCATTACAAATTATGGGTTAACAGTGTCCTCCAAGGTTTAG
GCAGATAGAAAGAAATCATCTAATTTTTGCTTCTGCTGTAATTTTGGACCTTGATCTCCT
ATGGTTTTCTTTTCCAATTTCTTAGTGAATAATACATTGTATGCAGGGCTTGTCAATTACT
GTGTTCCTGCTGGTGAGGCTCGCCTCAAGACACTTGAACTTGCTAGGGATATTAATCAG
AAGGTTAGACTTTAGTTATTGAGATAAAGAGGATGTGATGTATTTATCCAGTGTGCCACC
CATATGACTTCCAATTGCAATTTAGTCACGAACAAAGAAGAAACATAAAAGAAGTCCAAC
TCTTCCTATAAACAAAATGATTTCAAACTGTACTGTACATAGATAATTGTAAAGATTCGTT
AGCAGTAACGTGTACTCTTTTGTACCCTTTTCACCTTTTATGAGTTATGCACCCTCTTTT
GTACCCTTTTCACCTTTTATGAGTTATGCACCCTCAAGGCCATGAAATATGCTTGTCACT
GGATTTTCTTTTCTTTTGTGTGTGTTGAATGAAGTTGAGGCTCTTGTTTGAACTTTTTATT
GTCATCCATGGACCTTAATTTAATGGCATTTACTAATCCTATGCTTGTTTGTTTTCCACTT
TGTGCACTGCACCTTCATTTTTTGTGACAAGCTTTGTTTCTTGCTTTTGGTCTTTTTCTGT
CTTGTTTTTTCTTAGGTGGAGGATCATTGACTATTGCATAGTTCCTTGCTTTGGTTTCTTT
GTTTTCCTTTTCCCCTTCTTTTTCGATTTTTAGCTATTTTATGGCAGGTTCACATAGAAAA
CAAGTGTTACTCTATTGTTTTTCTTTCCCTTTTTTCTCCATGCATCTTATAGAAACCGAAG
CTTAAGGTTTCTCCACGCAAGCTGCAACGTTCTGTTTTATAAGCTTCATATATTTCTGGT
TTTCATGTAGTATGAAATGATATTGAGTGGGATTATTAGGAAGCTGAGACAGATTGAAAA
GAACAAGTAAAAGCCACATTGGTGATTCCCTCATGCTTTCAACCTTAAAAGGTCATTTCA
ATGTCCAGGGTCCAGAAAAGGGACTCACTCTATTCATGTTCTATAAGAATGGAGTAATC
CACTTGACAAGTTCTGGTGGTACTACTTCTTCATAAGGTTTTATTATACTAGTCAGGGCT
GTGTTGAAAGGATATGGTAGCATCAACTAAGTCCAATTGTTTCGTATTGTATAGAGCCTT
CCTTTTTCCTTTTCCTTTTCCCTTGTTGACTCTGCTTTTATACCTCCAAATGGAATGGTCG
TAAAGCTTTTGCTCTTTATTCAATAAGCTAAAACTTCTGATGAATAAATTTGGTTTAAGGA
TGCACGAGGAGTGAAAGTAAAATAAATATTGATGAAGGTTTTGCTAAAGATGCTCTTTTT
TATGCTCGGGTTTTGCATGTCAACTGACATATACCTTATCAATGTCGACTGACATATATT
CTCTGACAGGGTCCGGTGGCGTTAAGGATGGCAAAATGTGCTATTGACAAAGGAGTGG
AGCTAAATATGGAGTCAGCCTTAGCTTTAGAGTGGGATTGCTATGAACAACTGTTAGAC
ACAAAAGATCGGTTAGAAGGCCTTGCTGCATTTGCCGAGAGGAGAAAACCTAGGTATAA
GGGTGAA
SEQ 49
CTAGCAGCAACCAGCTATAGGAACAAATGTGTCAGCTCGAAGTGACATTGGTTGGCAG
CTAACATCCTCACAACTCTTGTGGTAAAGCATCTTTTGTACATAGTACATCAGATAGCAT
TGTGAGGCCCTGACAACTTCTTCATCGACTTCAGTAATCCATGCATCGTCGCATTTGTA
CCATTGGTTTCTCAAACGCAAATAAGTCACATAGTGACCTGATTCTAACATCCCTGAATG
TGTGACCACAGCGAAAATTTCAAATTCCGTAGAAATATCTGATTCATCACCGTCGAATGA
AAAGATTCTGTTCCCGTATCTCTTTCGTACAATTGAAGATGATAAATATGGTTTCATGTCT
AAAGAAAAAGGAAATTGCAGGTGGCGGTCAATCTTTCTGGACATTTTTCGGGTGGGAGA
ATGTTCAAAGCGTTTTATATGAAAAGATAGCACCAGCGGAAGCTTCTTGATGGACATTT
GTTTCAATGCATCTTGCTTTTCCTGACAATTTTCACAATACAGTTTCTGATCAGATCCCAA
CTTTTCTGGTCGTGTGAAGAGGTCCAAGCAACCTACAAGAGATTCATTTGGCTTACTCG
ACTTATTAGCAAAATCCTTTGGGCTGGAGTTGCAGCTATTCAAGTCAAGAGAAATGTCC
ATACAAGGATCATGAGTTGTTGAAGTGAATCCGCACGATGTACATGTGACATCAGATCT
CAAGAGCCCATAGAAAGTCCTATGAGCAATACACTGGCAATCTCCATTATCTGTTTAAG
AAATGTTATTTTTATCAGAGAAAAAGAACTAGAGGAAGCCACAAATCTTCAGTTCTCAAG
GTTATATATGAATCATCCCTCTTCTGATCAATGCATTGACAGCAAATGGAAGTACAGGCC
AAAATTGATATCCCAGAAAGGAAATTGCGCATGTACATAGACAAGATCTGTACTATATTT
ACTCACTGCGTAGCATAATGTCCTACATAAACAAGAAGAATACCAGCCATTCTCAGCAA
AAGATACCTTTGGTTGCCAAACTAGCTTTCCCCTCTTTATCATGGATCCTGTCCATAACT
GAAATGAAGAACTCATGAGCATCCTGCTGCTCGTAGGTAGCAAGATTTTCTGAATGCTG
CCACCAACTGCAAAAATAAACAACATTTCAATTAAAAGAATCACTACATAAGTTTTCAACA
TGTCAACGTCCAATAAAAGTTAACATTTTCCACGTTTAAGCATCCAATCTAAATTAAACAA
ATGATGATATCTTAGGTGGACATAGCAGCATAGAGAAAATTTCAACAGATTTATTTTATC
ACGATAAGAGAATAGCAATCTTGCTTATTGTCTGATTTTAGCGGTAATGCACCAAATCTT
GTTTATCCAAAAACTTCAAAGTGAAAACCTATGCAGTTAGCGCTAAAAATTGTAAACATT
ATTTACAATTTTGCAGGCCATGTTATAATCAAATATCCAGTATCAATACATTAAATGGTGA
GCACAGATAAAAAGCAATTAAGAGATAATGACAGGAGATAAATCCTTTTAACACTTACAG
ACCTGTAAAGAAACCGAGCTGGACTATAAGGGGTCCGATCACCAGAAAAGACAGCTGA
GAAGATAAGGTCAATATCACAAGGCAGGCACAACCGATCCGACGACATCTTTCTGCAAA
TATCTCGGTTATGCCTATCGCTAAGGAAGTAATTTCTCAAAGGGGGTGCATGAAGTAAC
ACTTGCAACACAGAGTTCATGAAACAAGTATTCCCCAAATTGTTCAAACCCCTTAATACT
AAAGGAAAACATGATTTCGACTTCTGATCCCTCCTTAAAAACAACGTCTTCATATTCTTT
GAATCTAAATCCATCCCAAAACTCAACCTTCTCCTCTTGCTCAACCTCAACTCACTCTCC
ACAACCCCAATTTCTGTTCTAGGAAACCCCATTATGTGTTTACACATCACAACCTTATCA
AAATCAGGATCATACACCTGATCACAACACACTGAGCAATAAAGCTCAGCCCTTTCCAT
GTCTACTGAAATCTCATGCCCAGCTTTACACTGACTATGCAAAAGGGCATGGTTTGATT
CAGGTGACAAACAACATAACACTGATGAACAGATCAAACACATGTAAAATCTACCCTCAT
GTCCACTACAAATACTACATCTAGGTAGCTCTGATTTGGATATTTCTAATGTGGTCCTAC
CATATGGGGTTGTCTTAAAACATTCTTGGATCAAACTATACCCACTCATACCATTTTTCA
CCTTGTAATCTGCAAGATGCTTACAGGGCTTTGGATTTATATATAAAGAGTTACTTGAGC
ACAT
SEQ 50
ATGAAAGAACTTCATTCTCTAAGAGAGATCGAAGGGCCTGACCCGAATTATAAAGATAT
ATGCTTTTCTGGTGCTGGAAGGTAATAAATTAACTATAGTAATGTTAGATCATTAACTTTT
TCTTTCCTTTATTTTTGGTGTTGTTTCTTGTATTGAATGTCTTGTATATTGCAGTGACATC
TCAGAGCTCTCAAAATCATTTCCTCCTATCGACATGGTATTTAGCAATGGAAAGAAACTA
TCTCTCACTCCTGAAAACTACTTATTCAGGGTAGGCATCTTAATCCACATGGTTTTTATC
TTACTACCTTGCCTTTAGAATCTGTATCTCCTTTTGGCTTCATCTCTCCTAGTGGCTACA
TTTTTTGTCTTTGTTTTGATAAGTGGCTCCATTTTCTCTCTGTGTTTCTATATTGACTAATT
CTGCCCTTTTGCTTACTGTAACTGATTGCTATAAAGCACTCAAAGGTGCGTGGGGCTTA
CTGCTTGGGAATTTTTCAGAATGGGAAGGATCCAACTACTCTTCTTGGAGGTATTTGTC
ATATATATCTTTTAGAATCTTGGGAAAGTTCATCTGCCAAATTCTTCAGTTGTATAAGCTG
TAACATGCGTGCCTTTGCTTTTAATTGCAACAGGTATTGTTGTCCGCAACACTCTTGTAA
CCTACGATCGTGAAAATGAAAGGATTGGTTTTTGGAAAACCAATTGTTCTGAGTTATGG
GACCGACTAAATTTATCTCCTTCACCTCCACCTCCACCATTGCCCTCAGGCTTGGACAA
CACAAACTCCAGTGCAAATTTGACTCCAGCACTGGCACCTAGTTTACCTCTGGAGCATG
CACCTGGTACGAAGAAACTGTTCTCCTATCTTTTTGTCACCATTAGTATGCCTTTCAGTC
ATGCTTTTATCCAGTTTTGTAGTGGAACTGGTTTTATTTCAATTATTCTACCGGAAGGGG
GGAGCCTTAGAGCAACGGTAATGTTGTCTCCGTCTGGCCTATATGTCATGGGTTCGAG
AAGTGGAAGCAGCCACTATTGCTTGCATTAGGGTAGGCTGTCTACATCATACTCACACC
CCTTAGGGTACGGCCCTTCCCGGAACCACATCAATCCGAGATGCTTTGTGCATCGGGC
TGTCCATTATAATTCCGCCAGGCTGTTTTGCATCATTTCCCCCTAATATTTTTAATCCATT
TTGGTTTCTGATTTGCTATGCTGGTTTTTTGCTATATCGCCTAAGATTAGGTTAGCTTTG
ATGATTTCACATCCTTTCTTTGATTAAGGTCCATGAATGTTCCTGTGTCTCCAAATGTCA
GCTTTCAAAATGACATTTGAGCTTGCGTTTTGTATTGTTTCATCAAGTTTTGTATTCATCT
ATCTCCTTAGCATTCCAGAGTTCCTGAGAAGCACTCGCTAGTAAAGACGTATTCTGATG
TCATGACATTTTTAACCTTGTTGGAGTTTGGACCCAAACAAACTTTTTTTACAGAAGGAA
ACTATAATTTTAAGGAGTACAACAGTTGCTGTATATAGAACATGGTGAGTAACTCCACTC
TTGAGATGCCTTCTCTTCACTGAAGTCAATTTCTAAAAACCTCCGTGCTTGACACAGATT
TGTTGGTATAGATTTGTGCTCCAGAGATGCAGATGGGTCCAGCGAATTTTTCACTAGAA
TTTTTCTTTTTTTTCTCACCACCTGTCCAGCATAGTGCTGTCAAAAGTGACAAGCTTAGA
AAAAAACCATGTGCTTGGTGGGGCTTTAACTGCAACATGCTATAAAAACGTTCACTATAA
ATGTAATGTAAATAAATAACCATAAACACAAAATAGCAATTGTTGGAAAAATTGCAATTTA
GTGAAATACACGAGGTGTCAATCAAGTTCAGATCATATTGTAAGTCTTGATTCAAGGTG
CATTTTTAAATTAGTAATTTGGATCAATGATTAGTTTTCTTAGACTATAACTTTCAATTTTC
ATACTCGTAAGAACTGATATACTCATATATAATATAACGTTTTTCTTAATAACTAATAAAT
GCTTTCCTAACTATATTTATTTTTGTGCTATCCTATTAACAACAGAGCCTGTGGATGTTAG
GCACCCACTTTAAGGCCTTTTTCCTCGCACTGAAGCCCTACTTTTAAGGTTTACTGTCAC
GACCCAAAATTCCACCTTAAGGATCGTGATTTCACCTAGTCTCTAAAACTAGGTAAGTC
GATCACTTACAACAGTTAAACCATTAAAACATGATATTATGAAGCGGAGTTTAATATAAAT
GCGAAAATAAAGGTGATACAAGCCAACACGGCGTTAATCACAACAAATCCCCAAGACTA
GGTAATACAGAGTCACGAACTCTAACTGAATACATAGAAATATTTCAAAACAAAGATACA
ATACTGTTCTGGCAGATAATTGACAGTATAAAGATAAGGAAAGACTACAAGGGACTTCG
ACGATCAAGCAGCTCTACCTTGAATCCTCGTGATCAAAAAGCTAACTCTGCCTAGGTCC
TATGCCTCCAACACCTTGATTTGCACAAAATGTGCAGAAGTGTAGTTTGAATACACCATG
GTTGGTACCCAGTAAGTATCAAGGCTAACCTCGATGGAATATTGGCGAGGTTCAAGTAA
AGACACTCACTAGTCAAATAACCTGTGAAAAATATCAAAAATGGGCAAATGGAATAATAA
CATAAAGTCATAACTGTAATCTCTTCAAATTAAACGATACCTATTTAGAATAATTAAAGGT
CCCGTTCTGACAATAAGCCATCAAATAGAATCACGCACACCCGGCACCTCGTACCCACA
TTAACAATCACCCTCGCACGGCAAAGGCCTCGTGCCACAACATAAGATATACCTCGCAC
GACGAAGAGCTTGTGCCACAATATAAGTCACAACCGCATGGATAACTCATATGCCAATA
TCACAATCCGCCTGGCGTGGTCACATGCTCAATATCACAATTCGCCCGGCGTGGTCAC
ATGCTCAATATCACAATCCACCCGGTGTGGTCACATGCTCAATATCCCAATCCGGCTGG
CATGGTCACCGGCTACCTGTCCAAATGTACATGATCAATGGACATCAAGTTTCATACTC
CTGGACTGATATTAATGACATGTTATGGTATATGCATGTGCAAGTGTATTATCACAGCTT
AAATCATCTAAGTAATATCAGAGACACCAAGTGGCACATTAGGAACAACACAACAAATC
ACGTAATATGTATGACACACACAAGGAAGTCAAAAGCAACAACCAGAATACTCCTCTTT
CATCAACAACATGCCCCCAGGCCATCACATAACATCCCCTTATTGCCACCCTTATGTCA
CCACGTTGACAATATCATAATAGCCACCCGTATCGCTCCGCCTAGGCAGTATATCAATA
GCCACCCGTGTCACTGCGCGCAGACAATATATCAATAGCCATCCGTGTCACTCCGCAC
AATCAACAACAGTGAATTGTCATCCTTGTGCTCCGGATAACAACAATCGATCCACACAT
GTCCACATATGCCACAATATCACAGGATAGTAGTATTAGAGATTTATCACGATACAAGCT
CACCACTCATCAACAAAGTGCACAAGGACATATCATTAATATAGAATTGCTGAGGGGTA
TTCAACATTTAAGCATGAAAGCTACTCAAATTAACAAGAGTCTCACAAGCGCCCAACTTG
GCCAAATAAGGAATTAAGATCCTAAAACATGATTTGTACATGGAATATAAATAACTTAAT
GTCAAAAATAACTTGATGTCATAAATAAAAGCCATAGGAAACGATTCTGAATAATAAAGC
TTCTATCTTGAACAAGAATAAAAAGTAATCCCAAAAAGTCAACCCCGGGCCCACACCGT
GGAATCCGACAAAACTCACAAATTCCGAACACCCGTTCAAATACGAGTCCAACCATACC
AAAATCATCCAATTCCGGCCTCAAATCGGCCTTCAAATCATCAATTTATGTTTTAAAAAA
GTTTTTACTATGATCTCCAATTTCTCCCATTCAAATCATCAATCAAACACTAAAATTGAGA
TTGGAATCATGAGAATAAACAAATCCGAGTAAAAAATACTTACCCCAATCCAAATCGTGG
AAATTCCCCCAAAATCGCCCAAATCCGAGCTCTATAACTCAAAATGTGATAAAATAACCA
AAACCTTTGAAATAGAGTACTTATAGATCTGCTCCAGGTAAACCCTTCTCAATTGCAGGA
CCAGCTTCGCAATCGCAAAGCACAAACTTAACTGACCACAGAAATACCCTTCGCGTTCG
CGGTACATACCTCGCGAACGCGATGCATGGCTGAGCCAGACCTACGCGAACGCGGCG
TAGACCACGTGACCGCGAAGACAATACCACCAGCTCCCAGTTCTTCATCGCGAACGCG
TCATTGCCATCGCGAACGCATTGACCAAGCCCCACAAAGCTACGGGAACGCGACCCTC
CAGTTGTGAATGCGAAGAGGAAAAACACTCAGCTCCAATCATACACTGCGCGATCGCG
GTTAGCCCCTTGCGATCGCTAAGAACGTCAGCAACAACAGAAAACCAGCAACACAACAT
GAAGGAAAATGGTCCGAAATCACCCCGAAACTCACCCGAGCCCCTCGGGGCCCCGTT
CGAACATACCAACAAGTCCCAAAACATAGACAAACCTACTCGAGGTCCCAAATGACACC
AAACAACATCAAAACTACGAATCACACCGCAAATTCAAGCCTAATGAACTAATGAACTTT
CAATTTCCAAAACTCATGCCGAACCATACCAAATCAACTCAGAATGATCTCAAATTTTGC
ATGCAAGTCCCAGATGACATAAACGGACCTATACCAACTCTCAGAACCGCAATCCGAAC
CCGATATCAACAAAGTCAACTCTCGGTCAAATCTATCAACCTTCCAAACCTTCAACTATC
CAACTTTTGCCGGTTCAAGCCAAAACAACCTAGGAGACTCCAAATCCACATCCGGACAC
ACGCTAAATCCAAAATCACCATCCAGACCTAACAGAACCATCCAAACTCTGATCCGAGA
TCAAATACGCAAAAGTCAAACTTGGTCAACTCTTCCAATTTAAAGCTTCTAAAATGAGAA
TTATTCTTCCAAATCAATCCCGAAATGCTCGAAAACCGAAACCGACCATACACGCAAGT
TGTAATACATCATATGAAGCTACTCACGACCTCGAACCACCGAACAGAAATGCAAATGA
TCAAAACGACCGATCGGGTCGTTACATTTATGTATGCTTCAAATGAGCATTCAGTGACA
CTGTTCAGCAAAAGGAGAAACTCTACTAGCCACTTGTAGCCACCTCCAGGGACCCTCTC
TGTCTCGGCCATGGATTACTTTGAGGAGTAATAGGGCTTCTCCAAGCGGAAACATTCCA
CGCATGCTGTGATCCTCCATGTTTTCTCTGCTAATCTTTGCTACTTTTTCTGGCGGTCCA
ACTGGTTGATCAATTCTACTAACACCATCCGAATGAGCCCTCAGGAATTCATCTCCCTA
CTTCTTTGCCAGATACAAGGAAGGCGTTGTCCTCATAGGGTTGGCCTTGGCATAACTCT
CTGATAATTTGACACGTTGCTTTAATTTGGTAACAATTTACAATTTTGGGGGTGCTGCAC
TTGATTCCATTGAGTTACACCATTTCTCATATTTAGGAATGGTCCTGTGCAAGATTGAAA
TGTACTGAACTCAGTTTTTCCCTGTGCAGATATTTATGATTGTTATTATTATTTCATCTTT
GACCTGAATTGGCAGGGAAAATCAAAATTGGACTCGTATCATTTGATATGTCACTGAGT
GTTGATTACTCAGCATTGAAGCCTCGTGTTCCAGAGCTTGCCCATTTTATTGCGCAAGA
GTTGGAGGTTAACGTCTCACAGGTAGTTTTTGCATGACCCAAAGTTGTGTCAGTCTGAT
GTAATCTAAAACTGTATATCCCATTTTCTTTAAGTTACTTAACTGTATTTTAATTTTGTTCA
ATATGATATGTCACTTATTGGAAGATACCTTGCAGGTTCACTTAATGAACTTTTCGACAG
AAGGAAATGATTCCCTCATTAGATGGGCCATCTTTCCTGCAGGATCTGCAAACTACATG
CCAAATGCCACTGCAACAGTAACTCTAAACATCTAGAATATGTGAGGACTATTTCTTGAT
TGAAGAACCCTTTATTCATCATTTACCTATTTGCAGGAAATAATAAACCGGTTGGCTGAG
AATCGTTTTCATCTTCCTGATACATTTGGAAGTTATAAATTAGTCAAATGGGACATTGAA
CCCCCACCAAAGAGGTATAAAAGCTATCTCCATTCTTTGCATGTTCATAAAATATTGAGT
TCTGCTGTACAAACTTTTAGCATCATAGCATTACTTATAAAATTATTCTGAATTGTCAAAA
CAAATGTGCCTTTTCTTTTCAAAATGCAAAATAAATCTCCGCATTGCATTTCAGATGGGA
AAAACATGACACGCATCTTTTCATCTTGCCTTAAACACATGTTTGTAAGTTACATTCTAAA
TTAGGAAACGTGAATGAGTCTACATTGCATCGCACCAGTTCGACTGCATATTCCAAGGA
TAATGATGAATAGGTGATGACTTTCGTCTCCATTTTTCATTGTTTCAATTTTTCTCAAAGT
TTCTTACTTGGATTGGTGGATAAAGTGGCAAAGCCAGAATTTTTTTATAAGGGATTCGAA
AATACTAGAATGTCATAATTGAGATCTGAACTTGTGACTTGAAAGCAACTTTTGAATCCT
CTTTGCTACTAAACTAAAAAATTTCCCCTATGGCAAGGAGATTCAATAGCTTATATATAA
CCAAAAAACTTCATTTTTACCCTATTCGCATACTATAATTTGAAATGTTTTTGGTCAAAGT
TTAATTTGCTGCATCTCAAAATCTTAATAGCAAAATATTACCTTAATTAACTCTAATGTAA
AGAGATTGGATAACACACCACAACAATATTTTTGGTAGGTGAATATTACTTTAATTTTTTT
GACAATTAATTGAGATAGGAGTTCTTGATATTTTTTTTTTGGTTTTGGTAACTATCAAGTT
GTTGGTTTGATATGGTTTCATTGCAACGATTTAGGATACGATGGCAGCAAAATTACCTTG
TTGTAGTGTTTGCGCTACTAGTTGTCCTGATAATTGGATTATCAGCTTCTCTGGGATGGT
TAATTTGGAGACGAAGGCAAGAAATCCCATATAATCCTGTTGGAAGCGCTGAAACACAT
GAAAAAGAACTCCAGCCGCTAAAT
SEQ 51
ATGGTCACAGGTCTGAACTTCCGCCATAACTTTCTCGTGTCAGCTTTACTATACTCTAAA
TTTGAACTATAATACCACATTGATGTGAAAATTCACACTTAGGTATCGATTTTTTAACACA
GAGATTTATTTTGTGTTCATGCTTTGGTTTCAAGTATTGGAGAACCTCGTAATCGTTCTC
TATAAGCTTCTGGTTTAACAGATCCTAATTTTTCTTAGAAGCTCGAATTATTTTGTATTGG
AATGAAATGAACCTGAATATTGTGGACGATACAGAGGAATTATTGTGGTATAGTTGATTG
ATTGATTGATAGTCTTAAGTAAGAAAAAGACCTATTGGAGATTATGGTGAAGCTTATACA
GGAGCAGCTGGACTTGGTTTTCACAATATCTTTTTTGTTAAGGTTAGAATAAACCTGCTA
AAATTTTTTACTTATCAAAATAAATAAATAAACTTGCTAGAATTTTTTTCAAGTTGGTGATT
GTTTAAGTTTTTTCGATTGTTTTTTCCTTTGGTAAAAACGTTTTTGGCAAGAACTATATTTT
GAAGTTGTGGTTTGAGAGTGTTTGTCAAATAATCTTTTCAAACAAACTCTCTTTTCAAATA
TCCGAACATCTTCAACTTCCACGAAATAGGTGACAACTGGATTAAATTTGGGGGGGGG
GGGGAGTGGTTGATGGTGTATTAAGTTCAAACATCATTTATCTTTTTCTCTAGGAGCAGA
TTTTTAAATCATTATAGATACATTGCTTGATGTATGTTTGAGAAATACCATTGGTGTTTCA
TTTAGGCATCATCACTGTAATAGTTTGGTTAATGTTTTGTTAATTCATCATGGTGGTTCAT
TCAGACAGCATCATTCGGCTATGATGTTGATGTTGATTTGGTTACACAAGCAACTCATTG
GTGGAAACAGTTTTCTAGGATACCCCTTTTATCATTTTCATTTGATTGTACCTCCTGTTTA
TTTTTGCACTTGGACAATTACGGGCTACAATTCTCTCCTTGCAAATCTGGTGATTGGTTG
CAGTAAGTGTAAAGTGGCAAAAAGAAGTCTATCCTGCTGTGGAAATTGACACTAGCCAG
CCTCCATATGTTTTCAAAGCCCAGCTGTATGATCTAACAGGGGTACCACCTGAAAGGCA
AAAGATAATGGTCAAAGGTGGTTTGCTTAAGGTATAAAATTTCGTTTCACTTAGCTTGTT
ATGCCATTTTTCACTTTGCAAATAAAGCACAAAACTCATTTGTGTTTTGAGGAACGCTGA
AATTCTCAGCATCTGATGCTTTGCTTGTTAATTTTGTTGTTAACTCTTCGGTTATTTCTAT
GGTTGTTTAGGACGATGCCGACTGGTCGAAAGTAGGAGTAAAAGAGGTACACGGCTAC
TCATTGAATTACTCTCTATTTTTATGCAATGAAGTGCCAATTATCTAGAAGCATCTGTTAT
TTATTATTTCCAGGGTCAAAGGCTGATGATGATGGGAACTGCAGATGAGATTGTGAAGG
CCCCCGAGAAGGGTCCTGTTTTTGCTGAAGATTTACCTGAAGAAGAGCAAGTGGTTAAT
GTAGTAAGTTTTTTGACACTGATGTTGTTGCATCAAATCGAATGATCCGGAGATGTGTGA
TTCCTTATGTTTAACTGCTTACATAGTTAGTCTTGTCTCATATGCTGTACTTATACCAGCA
CTGGATCCCTAGTAGATTTATTGGTATAACTTTACCGCAATTGCTTTGTTCATTTTTTTTC
AAAAGCAGTTGCCTTTTCCAACTTCTACATGCAAATAAGCTTTAATATATAATTCTCTATT
CTTTTTCCGCTGGCACAAGTGATTTTGTGGATGCCAAGCGCTTGTCGAATGCGTTTCTT
GTTCCGCTGGCACAAGTGATTTTGTGGATTCCAAGCGCTTGTTGAATGCGTAATTTCTT
CATTTACACATTATGAATCGGCCCTTCCCAAGACCCCGCACATAGCAGGAGCTTAGTGC
ACTGGGCTGCCTTTTTACACATTGTGAATCAGATTACTATGTTGTTTTAGAGTCCTGTCT
AAAAGAACTGCTAACTTTTATAATGGCAAGGCTTAGTTTTGTACTTTTAATCAGTAAATG
GGTGATGAGAATTTTTATAATTTTGTTTCCTCCAGGGTCATTCTGCTGGATTATTTAATCT
CGGAAATACATGCTACATGAACTCCACAGTACAGTGCTTGCATTCAGTTCCAGAACTGA
AGTCTGCTCTAACAGAGTGAGCATTTGCTTCTTTCATCCTTTCCTTCATTTTTGGGAGTC
TTTTGGTTTAGGCTTTTTTTTGGTCCTTTTGCTTTAGCCTTGATTTCCCAAAACTTGATCA
AATTCAATATGGTTGCTTTTAAGTCTAGTTCTGAAAATATTTAGGTCTATTTTGATTGCGT
TGCACTTTTTTGGTTAGGCAATTCGATCTATTTGCACCTAATCCGTAATTCCTGTTTTTGC
TAAAATTGATAATTCTGATTTTACTGTTTATATTTGTCAAATCTATTAATCATAATTTAACT
TATATAATGTGTCGCGTTGTATACACCTAGATAGTATGTATTTACGGAGACAAAGCGGA
GAAAACAGTAATTAGTAGAGGAGACATAAATTATCCTGTTTTAATTCCTATATATCCTCC
CTTATATAAATATGGACTCGTTTCTCGGCATGTTCTCCTTTGGATGAAATCAATCCAAAA
TGTAATCCACTTTGAATCAATTTGGACTCCGAAACTGTGGATCTTTCCCGAACATTATCA
GAAAAAAGATCAAAATGGCTCCTGTTAAATACCAAGTGTAGGAGTTCCAAAAACAACTC
CGTTAGGTACATTTCTTTTTGTGTTCCTGAGATTCTGAGTTTATTTATTCTTCCTGTTAGG
TATAACCAGCTTGGTAGAAGCAATGATTTGGATCACTCATCTCATCTCTTGACAGTTGCA
ACAAGAGATCTGTTTAATGACCTGGATAAAAATGTCAAACCAGTGGCACCAATGCAATT
CTGGACGGTACTTTATTTGTCTTTATTCTACTCCTAATATTTTTGGTTACGACTTAGTATT
CCTGACTTTGTATTCTTAGAAAATGTGTTTGGATTTCGAACAAAGTTACCATACCTTTGA
AGGAGAATACGTATGCTGAGTAGGAGATAGTGTTTGCCAATAATTTCCTATTGGCAGAC
TTCAAAATATACTCGTTTAGCGTTGAACACTGAACTCGATATATTTTGTCATGACTTTTGT
GTGCAAATGGATTTGCTCTTAGAGAGCAAGGATGAAGTACTTTGTATAGGATGCGAATA
GAATGACTTAAGCTTGGGCCTGTTGTCTACATGGTCAAAACTTTGTGCATTATCATTCTT
GCACAAGGTTACTTGGATTTATATGAGAACTATAAATGTAGCCTATGTTGATATGTTTGT
CTTTTTAGTGTTTTCGTCACATGAGCTACTCGGGCATCAACATTTGATTAGGTTTATGTT
CACAGGTTTTGCGGAAGAAATATCCTCAATTTGGCCAGCAGAGCAATGGAGCTTTCATG
CAACAGGTTCCAAGCTTACCTAAGCTACCACAATGCTTCCTTGTTATTAAAAAAAAAAAA
GTGTACCACTATTGCAATTGCTATATAGAGGTCCTACTGACATGTCCTGGATAATAACAG
GATGCTGAAGAATGTTGGACGCAACTACTTTACACCCTTTCTCAGTCTCTTAAATCACCG
AACTCTAGGTACTACATCTCCTCTCGGGATATTTCTTGCAGATGAAAGTCCCTTTTCTAA
ATAATTTCCATGTTTTGTTTCGCTAGTTGTTTTCTTTGTTTCAGTTTGGACATATGGTCCC
TATTTTGTAAAAATGTGAAGGAAAACTCTCCTATATATACATTGTGCTTCTTTATGTCATG
ATTGTGACTGCTCTTTATCTCGGTACTTGCAGTGGAAGTCCGGATATTGTGAAGGCTCT
CTTCGGTATTGAGTTTGACAACAGGTATTTCTGCAGTCAAATGTTGTTTACCTTCCAGTT
ATTCTGTTACCTTATCCCCTTTGCATAGAGTTGTTCTGCACCTAAATATTATAAGAGGCA
TGTGAACTTACTGCTGTATATGTATTGAGATAGGAAGGAATGCAGCTAGTGGTCCTAGG
ATGTAGGATGTTCCCTGTTCTGACTTTGAGTATCTTCTGGGCAACCTGATGAGAATCAA
CATCCTCAACTTTTACTCTGTCATATTGTGAATCATGTAGTTGACAATAAGAGATGAATTA
CTGAAGTTGTTTTGAAAGTTGAAGCTAAAAATCATGTTTATGTTGACTTCTTTTAGTTTCT
CCTACTGTTAGTTAAGTGTACTATAGTGCTACTAGTGTGTATTTGTATTACTGCTAATGA
AAGGTCTGGCTGGTTTATGCCGTTCTAGGGTATTTTCAACAGGCTGTGCTTTTCTGCTG
TAGCCTAGACCTCTGGGCTAATATTTCTTGTCTAGGACCTGACCTACTGCAATGAGGTT
GGGAAGATCCCAATGCCCATCCCAGAGTTCTCATGTGCTCAAATTCATCTACTGATATA
CAAAATTTAATTTTCGATAGTGTGGGAAGCTGTTTATCATTCATGTCTGACTTGATCTATA
CTGTTCTGACTGGATTATGGTGGTTGTGCTAGAGTCCACTCTGTGACTATGTTCCATAT
CTGATATTAACTGCTAGATACTGAAGAAAAATGACTTAACTCTGCCCCTTATTCTCATGG
TACTGATATGGACCAGGATTCATTGTGCTGAAAGTGGTGAAGAAAGCACAGAAACAGAA
ACTGTATATTCCCTTAAATGCCACATTTCACAGGAAGTGAACCATTTGCATGAGGGTTTG
AAACGTGTAAGTTCGGTTCTTTTCCTCCTTGTATGTCCCAACTTCTAACTTTAGTCTTGTT
TCCTCCCAAATGTTTCATATTACTGCTAAGTTCTGTCTCAATTTTTTCTGTTGTGCCAATC
CAGTAATCATCCAATTTGATTAAGAGGACAGTCCCAAAGTGAAAAATGACGTATCTAATT
CATAGAAATTCCTTTGGTAGCTGTAACCTTTAAGGATAACTAACAGTTAGTCCTGAAATG
GTTGGTTGGATGGAGAAACTATTATATAAGATGCCTCACGGGCGGCACATTGGGGGGG
GGGGGGGCTTTTNGGGGGGGGTCTTTTGCTTTAGAATTTTTTCATGCCATGATTGGACC
AAATGTGGGGCCTGCATGTTGAGGTTCATGCAATAGTTTCACATCAGAGGTAGGCTGA
GCCATTGGAGCCGACTCATAATGCTTTTGGTGGGAAAAGATGCTTTGGAGATTTTGTTT
AACTTGGTGCAAAATCGTTGATGATGTTTATACTGGAAATCTGGTATTTATCCCCTCAAA
ATAATTTAAATGCACTCATATGGCCATTGCTTTTTCTGACAGGGTCTGAAATCAGAACTG
GAGAAGGCGTCTCCGTCACTTGGACGGAGTGCAGTTTATGTGAAAGACTCCCGAATCA
ATGGCTTGCCAAGGTATTAACTGGCTCGATTAAATTCCATGGCGATGTAGCGACATATG
TATGATCCGTAGCTTCTGCATATAGACTATCTTAATCCACGCCTTTCACATAACAAAAAT
GCCTTTTGATGTGTTGAAGTAGTTCACCTCATTTTTGGCATCACTTCTTTCTCATTCTCCT
TTCTTTTTTTTTTTNNNNNNNNNNNNNNNNNNNNNNNNNNNNNNNNNNNNNNNNNNNN
NNNNNNNNNNNNNNNNNNNNNNNNNNNNNNNNNNNNNNNNNNNNNNNNNNNNNNNN
NNNNNNNNNNNNNNNNNNNNNNNNNNNNNNNNNNNNNNNNNNNNNNNNNNNNNNNN
NNNNNNNNNNNNNNNNNNNNNNNNGGGGCTTTTAATTCTCACACTTTTCTGGATAGTTT
CTTTACTATTTGGTGCTGATTATTGACTGGTCTATGTCAAAATCTTCTTCTATTTTTACTA
TTTCTTTTTCATTTGATGAATAGATACTTGACCATTCAGTTCGTCCGGTTTTTCTGGAAGA
GGGAATCAAATCAAAAGGCAAAGATTTTGCGGGTATGTTGACTTACTCATCTTCCTTTTC
ACATTGATCAAATAGTTGGTCCTCCTTGAAAATGTGTCGGAAGAGGGAAAAAGGATCAG
GTTACCATGTCCTGAACCGAGAAAGGGGGATGGAGAAAGGGAGTTCACTGTTTTACTTT
GTTTTGTGAGGATGAGCGGTTCTGTCATGTTTAGGTGCTCTAAAGTCTCGCCTATTCTC
TCGATTGTCAAATTCTGAACTGTATATTTTAACTTTAGGCTGGTTTGTGATGGTGTCGGT
GTAGGAGTCTTGGTCTATAATCCCTTCCCAATAAAAAATTAACTGAAACTTCTCTTAAGT
TTCTAATTGATCTTGGAGTAGGTGTAACTTGGGCACAATTACAAAGAGGAGTTCTTATGC
ACCAATGACTAGATTTCAGCTACTAGAAGTAAGAAGTAAGAGAAGGATGTGATATTAATA
CTTTGCTATTCTAGTGAGATAGTATGTACATAATATTTTTTTGAAAGAGAGTTCTGGTGA
GAAGCTGATATGTTTTTTTTTCTTTTTTCCTTTGTGTTGATACAAGATCTTCTTAACAATCA
AAAATATCTGAAAAGCTTTTTCCTGGATTCGGCCATTCGGGATAATAACCCACCCATTGC
CATAAGTTCTGGGATCTATAAAGTAGTTGTACTGGGTGTTTCAGATATCTTTGTGTTTGT
GAGAATGCACAGGAGAAATCTATTCTATTGATTAAAGTGTTGTACAACCCTATTTATATA
CAGTAATTACATAATAATAGGTATCTACTTCCCGATGTGGGACACTATAATACGAGAACC
AGTAAGAGACTTAGTGAAAATATCTGCTATGCTAGCTAATCATTCTACTTTACAAACTTT
GTAACAATATCTCCTGAGAGTATCTTTTCTCTGCCAAAGTGACAGTTGATCTCAATGTGT
TTAGTCCTCTCATGGAACACCAGATATGACGCAATATGAAGAGCAACTTGATTATCACA
CGCCAGTTCCATCGTGCTGATTTCTCCGAACTTCAACTCCTTAAGCAACCGCTTGATCC
AAACTAGCTCACACGTTGCCACAGCCATGGCCCGATATTCGGCTTCGGCGCTAGATCA
AGCAACTACATTTTGTTTCTTGCTCTTCCAAGACACCAAATTACTTCCTACTAGAACGCA
ATATCCAGACGTAGAACGTCTATCAGAAGGTGATCCTGCCCAATCAGCATCTGTGTACC
CAACAATCTGCTCGTGGCCTTGATCCTCGAATAGTAACCCTTTGCCTAGAGCTGACTTT
ATATACCGAAGAATGCGAACAGCTGCAATCCATAACTGACTTACAACACTCACCGGAAA
AGAAATGTCAGGTCTACTCACAGTGAGGTAATTCAATTTGCCAACCAACCTCCTATATCT
TGTAGGATCTCTAAGAGGCTCCCCCTGTCCAGGCAGAAGCTTAGCATTCGGATCCATA
GGAGTGTCAACCGGTCTACAGCCCATCATTCCCGTCTCCTCAAGAATGTCTTAAGGCAT
ACTTTCGTTGTGAAATAACAATACCTGAGCTAGACTGAGCGACAGTCTCGAAGTGCTGA
AAGAGTTGCTGCTTCAGATTAGTAATACCATCCTGATCATTGCCAGTAATAACAATATCA
TCAACATAAACCACCAGATAATACACAGATTAGGAGCAGAATGCCGATAAAACACAAAG
TGATCAGGTTCACTACGAGTCATGCCGAACTCCTGAATAATTGTGCTGAACTTACCAAA
CCAAGTTCGAGGTGATTGTTTCAAACCATATAGTGACCTGCGCAATCGGCATACAAGAT
CACTAGACTCCCCCTAGCAATAAAACCAGGTGGTTGCTCCATATAAACTTCTTCCTCAA
GATCACCATGGAGGAAAGCATTCTTAATGTCTAACTGATAAAGAGGCCAATGACGTACA
ACAACCATGGACAAGAAGAGACGAGCAGACTTTAGCCGCGGGAGAGAAAGTGTCACTA
TAATCAAGCCCAAAAATCTGAGTGTATCCTTTTGCAACAAGACGAGCCTTAAGACGATC
AACTTGGCCATCCGGGCCGACTTTGACTGCATAAACTCAACGACAACCAACAATAGACT
TACCTGAAGGAAGAGGAACAAGCTCCCAAGTGCCACTCGCATGTAAAGCAGACATCTC
CTCAATCATAGCATGTCGCCATCCTGGATGAGATAGTGCCTCACCTGTAGACTTGGGAT
AGAGACAGTTGACAAAGATGATATAAAAGCATAATGAGGTGATGACAGACGATGATAAC
TTAAACCGACATAATGAGGATTAGGATTAAGAGTGGATCGCGCACCTTTCCAAAGTGCA
ATCGGTTTACTAGGAAGAGGCAAGTCCGCAGTAGGAGCAGGATTAGGTGCAAAACGTG
AATCAGCTGGGCCTGATGCTGGCTGCGGACGACGATGATATGTCAAGAGTGGTGTTCC
TGTGGCGGGGAATCTAGGAGGAGTCTGTGGCGAAAGGTGAAGGAGGAGCTATAGTAA
GCTCCTTAAAGGTCGATACAGGTAAGACCTCAGATATATCAAGGTGGTCAGAAGAGGTA
AAGAAAGGTTTAGACTCAAAAAATATGACGTCAGATGATATAAAGTACTTATGAAGATCA
GGTGAGTAACAACGATATTCCTTCTGAACACGAGAATAACCAAGGAAGACACACTTGAG
AGCACGAGGAGCTAACTTATCTTTCCCAGGGGCTAAGTTATGAACGAAGCAAATGCTCC
CTAAAACACGAGGAGGAACAGAGTATAAGGGTGATTGGGGAACAATACTGCATACGGA
ATCTGATTCTGGATGGGAGATGAAGGCATCCGTTTAACCAAATAACAAGCTGTGAGAAC
TGCATCAGGTGGTCAGAAGAGGTAAAGAAAGGTTTAGACTAAAAAAATGTGATGTCAGA
TGGCATAAAGTACTTATGAAGATCAGGTGAGTAACAACGATATCCCTTCTGAACACGAG
AATAACCAAGGAAGACACACTTGAGAGCACGAGGAGCTAATTTATCTTTTCCAAGGGCT
AAGTTATGAACGAAGCAAGTGCTACCAAAAACACGAGAGGAACAGAGTAGAAGGGTGA
CTGGGAAATAGTACTGCATACGGAATGTGATTCTGGATGGGAGATGAAGGCATCCGAT
TAACCAAATAACAATCTGTGAGAACTGCATCGCCCCAAAAACGCAACAGAACATGAGAT
TCAATGAGAAGTGTGCGAGCAATCTCAATGATGTGCCTATTCTTTCTCTCTGCAACCCTA
TTTTACTGAGGGGTATAAGAACAAGAGGTCTGATGAATAATTCCTTGAGAAGTCATAAAC
TGCTGAAATTGAGAGGATAAATATTCTAAGGCATTATCACTGCGAAAAGTGCGAATGGA
AACACCAAATTGATTTTTAATTTCAGCACAAAAATTCTGGAATATAGAAAACAACTCAGAA
CGATCTTTCATTAAGAAAATCCAAGTAATCTTGAATGATCATCAATGAGACTAACAAAAT
AACGAAATCCCAAGGTTGAACTGGCTCTACTAGGACCCCATATATCAGAATGAACTAAA
GAAAAAACAGACTCTGCATGACTCTCAATACTACGAGAAAAGGTTTGGGAATGTTTTCC
GAGCTGACATGACTCACACTATAATCTAGATAAACTAGACAAACTAGGCACCATCCTCT
GAAGCTTGGATAAGCTTGGATGTCCTAAACTTATGTGAATTAGGTCCGGAGGATCTGTA
GCTAGACATGTCTTGGAGGAATTGAGTGAGTTAAGGTAGTAAAGGCCTTCTGATTCAAG
TCATGTTCCAATCGTCTGTCCCGTACTACGGTCCTGCATAATAAAAGAATCATCAATAAA
ATATATACCACAATGGAGGGCACGAGTCAAATGACTAGCAGATGCAAAGGACAGCCAG
GGACATAAAGAACAGAATCTAGAGTGACAGAGGGTGGGGGATTTGCTTGTCCAACTCC
TTTTGCTTTAGTTTGAGACCCATTGGCTAAAATAATAGTGGGAAGAGACTGTGAATATGC
AATATTTGACAAAAGTGATTTATTACCAGAGATATGATCAGAAGCTGCTGAGTCCACAAC
CCATTATCCAAGAGTACTAGACTGGGAAACACAAGCAAAAGAATTATCAACAACAGAAG
TATCAGTCTGAGCAATAGAGGCTACTTGTGGAGATGTCTGCTTGCTCGATACGGAGGG
AACTCATTATATTCCCCTTCAAATAAAGAAAATCCCTGGTTACCTGTAGTCTCGGTCTGA
GCAACATAAGCATTTTTGAGTGGACGACCTTGTAAAGAATAGCACACGTCACGAGTGTG
TCCAAGTTTATGACAATAAGAGCAATTGGGCCTAGATCTTCCAAAACGACCACCTCCTC
GTCTATTCTCCATAGTTTGAGATACCTGATTGTCCACTGACTGGGATACGAGAACAGAT
GAGTCAAGTGTCTGTGATGAGCTTACTAGGTGACTTGGTATTGCAGCAAGGCGAAGTAA
TTGAGAGAATAATTCATCAACATTGGGGACAGTCGGACTAGCCAAAATCTGGTCACATA
CTGAATCAAGGTCATTAGGGAGTTCAGCGAGTGTAAGAACTAGAAACATCTTCTGTCGT
TGCTCTTGTTGCTTTTCAATACTAGCAGAAACTGACATCAATTGCTCAAATTCTTCCATG
ACTGCCTGTACTTGTCCTAAGTGTGTAGACATATCCAATTCCTGTTTCTTCAAGCTTGTC
ATTCGCGATATTACATCATAGAAACGAGATAGTCATTAGTGTATAAAGTACGAGCCTTCT
CCCAAACTAAATAACATGTCTGGAATGGATGGAACAAAGGCATCAACTTGGAATCAATA
GATCGCCACAAGATACTACATAACTGAGCATCGACCTTCTCCCAAAGTGTTTTGGCCTT
TTCATCACCGTCGCTAGCCCTTTTTGTTAAATGATCTTGAACTCCTTGACCTTTACACCA
CAACTCGACAGACGAAGCCCAAGCTAAGTAGTTTGAACTTCCCATTAAAGGTTCTGAGG
CAATCATAATACCATAACTTCCAGAACCCGTGTTTTTAGACCCAAATACATCCACTCCCA
AAGACATTATTGGATTGAAAAGAGATCTAGCAAATTAGCACCAAATAAAACAAAGAATCA
ACTGTGGTTGCCGAAAAACTGCCGGAAAAAATACTGTAGTTGCAGGAAAATTTTCAAAG
TGCTCGGAATCAAAAAATAAAAATATGGGAAGGCTCGGAATTGCAGGGCGATCAGACT
GTTCTAAAGAAGTTTTCTGAAAAAATGGACGGAACGGGCTCCACGCGCCGGCGCGTGG
AGTAGATCTTGCCGGCGAAAATTGTCTTCGGGCGGCGCGTGAGGCGGAGTCTGACGG
AGTTGTTTGCTGGGGTTTGGTCGCCGGAGGTTGGGGACCTTATGGTGGTGTTGGTTTT
TGCACAACACCGATGGAATTGGTTTTGACGAAAAAATAGCCCTAAAAGGTCACCGGGAT
GAAGCACGTCGACGACTGGGTTTTCATTCCCGGATGTTTTCTCACTGCCGCTCTGATAC
CATGTGAGAATGCACGGGAGAAAAATCTATTCTATTGATTAAAGTGTTGTACAACCCTAT
TTATATACAGTAATTACATAATAATAGGTATCTACTTCCCGATGTGGGACACTAAACATG
ACTAACTACTTAACAGTGTTGAACATGGGTAACCCAGGGGGGTCTTCACCTAATTCCAA
AACTGAAGTGAAAAGAGGAAAAAGAAAGCAGGCTTGTGAGGTTCCGCGTTCCTCTCCA
TCTGATATGACCTTTCTATATATATATATTCTTTTAAATGATGCTTCCCGGCTAGCTTATG
CGCACCTCGATTATTCTATTTAGTACATGCTACCTCCCATCAGAACATGCACAAGGTAAC
TCTGTCCATCAAGGCTTAGGAAAATAGAAGAAATCACCTACTCTCTCCGTTCCAATTTAT
GTGATCCTGTTTGACTGGGCACAGAGTTTAAGAAAAAATGAAGACTTTTAGAATTTGTG
GTCCTAAACAAGTCAAAAAGGGGCCTAGATTATTTGTGTGGTTATAAAAGCTTCTCATTA
ATAGTAGAATTGTAAGTTTAAGCTAAATTGTTACCAAATTTAGAAATGGGTCATTCTTTTT
GAAACGGACCAAAAAGGAAATAGGTTCACATAAACTGGAACAGAGGGAGTAGTATTTTT
TGTTTCCATTGGGATTTGTGATTGAGATCTCATGGTTATGTATGCATATGTTGTGATGTA
GTTCCATATCTTTACTGTTTAGATGGTTGACAGGGAAATAGTAAGTTCTTTTTTAACTTAA
TTACGAAAATAAATTGTCTTCTTTTATTTAAGCTTATGTGACATTATTTCCTTTTTAGTTTG
CTTATAAAAGAATTAACCCTTTCTAAGTTTGGAGAACTAAATGTTCTCATTTTACGCTTAA
TGGCAAGCATTTATAGCCACACATTCGTTCTGCATATTTAAAACCTGAAGTTTCAAAAGT
CTTATTTAACCATAGCATGTTTAAGACTACAAGTTTCAAAAGTCATTCTTTTTTCCTTATTA
AACTTCCTGTGTAGTTAAACAAGGTCGCAATAAAATGAAATAGAGGGAGTACTATATTTA
AGAATGGTATCATACTTGGTAGTTTTTCTCTTCTCGTCTCTCCTTTTTTGGGTAGGGGAT
GCATCAAGCTGTAGGTTCAATTGTTTATAACTTTTAAATAGCTAAAGAACTTGCTCTAGT
AGTGATTTCGGGGGTAAGATAATCTTTGTGGTTAAGAATCCATTGAATATGGGAATAATA
AAAAAAAAAAAAGAAAAAGAATGCATTGGATTAGAGATCACAACCATTTTTAGCCGATAT
TGGCTGCGATGTGTTCTGGCTAATTTTTTCTTGAAAGGTAACAGAGGATCGGTTCTGGC
GAATTAACTAAGGTTCATTTTAAATATCACCCATATCCAACCTAGCCACCCATCTGTCAC
GTATAAAACTTATTGTGGACAAAAATAGAATGGTCACTTCCTTTTCCACCCACCGCTAGT
TGCGACGTGACAACAAGGAGTTGTAAATGTGATGTGATGGATTTTAGTTATAGCAGGAA
CTTAAATGATAATCTAGGAAGCTACAATTTTGCTATGCTTCAAACAACAGTCATATCTCG
TATTAAAACTCAGCAAGTCTTGCTTTTTTAGTAATATAGGTTTGCTAATATTTCAAAATCC
TATTTTATATTTTCTGCATGTATTGGATCTCTCATTGCTTTAAGATATAAGAAATGGTAAT
CTTAAACTATGTCTATGCCATCAGAAAGTGGATTACCCGCTGTCGTTGGATGTATATGAT
TTTTGTTCGGAAGACCTTCGCAAGAAACTGGAAGGTCCTCGCCAGGTACTGTCTTTTTC
CCATTGATCAATGTCTTTTAAGAAATGAGGAAAGACCAGACCCTCTTTGGCCCCTCTTTC
TCTTTCTTGTTCTGTTATTACATGACTCTAAATTTGCTGCTAGGTTTTGAGGGATGCTGA
AGGTAAGAAGGCCGGTTTAAAAACCAGTGAGAAAACTTCAAGTTCAACTGACGGCGAC
GTTAAAATGACTGAGGCTGAGGTATGAATTAATCTTTGTAATGTAGGAGTGACTTAAGG
GGATAAAGAGGGACCTTTCGGGCCCACCTATGGCGGATTGTACAAGGTGGTTTAAAGT
GGGAAATTAAGAATGTCTATAAGTAACTTCTGCCTTTTCTCCTTTTTTTTCCTATTGTTTA
TGCAGGAATCATCTAGTGGAAGTGGAGAAGCGTCTAAAACAACCCAAGAAGGTAGAGA
AACACCTCCTTTTCTTGATAACTTGATGACTTGATAAACATATGCTGCTGCTGTATTTTAA
TTGGTAACAATGTCTGGCATTAAAATTGTAATATTTGGGAGAGAAGTTATTGTCATGAAA
TTACCTTCCAACTCACATATCCTTTTCAATGCTTTAAATGAAACTCTGTTAGTTAATTGTC
AGATATAATTCTGCAGTAATATTGCGGTTCCATGAGGTTTTACAGTTCTTATGACAACAA
TGTTCTGCCCTGGGTATTCAAACTTCTTTTCACAAAGTCACTGTTAGTATCTTTGATTACA
AGCGATTGACCTTCTATTAACAATTTTGGGATCCCATAAAGATTATTAACTTGGATCAGA
TTTATTCCTTTTTAAATTACTATATGTCCCTAGACACCGGCGGACGTTTGCCAAGTTTCT
TTTGAAGGGGGCGCCTTTTAATTTTTAGAACTATGGAAGATCCTTAAGGTTTAGCTCTGC
TGATACAAGTACATTTTAATTTGTTTGGACATTTGTTTGTATGTAGAAAATGTAGAGAACC
TCTAGCATAGATAACCCCGTACTTGCCTTTGAATTTATATAACTACGAAAGATTCTAAAG
GTTTAGCTCTGCTGATACACTTACATTAAGTTGGTGTTTTCTCGGAGTCCTTTAATTTGTT
TAGACATTTATTTGTATGTGGAAAATGTAGAGAACCTCTAGCATTGGATAACCCCATAAA
TTGTCTTAAAAGAAAATTTTCTGAGTATTGGAATGAACTAGGGCCCAGATGGAGCAGAA
TGAATGTCGGGGATTAAATAAGGGACTCTAACTGGTTCTGGATTGGGAGCAGTAGTTGT
GAATGATCAATTTTATCAACAGTTTAGTGTTTCTGATATATAAGGGGAAGTTAGTCTAAG
AGCTCAATTTTGGAATTCTGTTATGAATGAGGAGTCGCAATGATTAGTGCTTTTTTTTTTT
TAATGATGCCCGATTAGTAAACTCCATTTCAGGTGTTCTGCCTGAGAAGGAACACCACT
TGACTGGAATATATGATTTGGTGGCCGTGCTGACTCACAAGGGAAGAAGTGCTGACTCT
GGGCATTATGTTGCCTGGGTCAAGCAAGAAAACGGTCAGTTTAACTGGGAAGAGATTTT
GTTCTAGTAATCGTTGCTCTTGGACTACCATCTGATACAATATATTGAAAATCTCTTTGTA
AACCACAGGAAAGTGGGTTCAATTTGATGATGACAATCCAATTCCGCAGAGAGAAGAG
GACATCCCTAAACTTTCAGGAGGTGGTAAGTGAATCACTTGTGTATTACGTCTTCGGCA
AATTTTCAAAGTCTGGCAAGCATATCCTTTCTTATAACAACAAGATGTAAAGCAGATGGA
ATATTTTGTTGCTTGTGTGCCTGAATGTGTTTTTCGTTCTGTCAGTTTATAGAAGTGCTTT
ATTTTTGGTTTCAGGTGATTGGCATATGGCTTATATTTGCATGTACAAGGCCCGTGTTGT
TCCCATG
SEQ 52
CTATTTCACTTGATGCAAGGAAAATTGATTACTCCTGGCACTACGAAGAAATGTTTGGTT
AAAAGGACAAAGGTCAGTGCAAAAACCAGAATAGTTCATTGCTACACTAGGTCCAACTA
GCCAGATAGATGCACACAATTTGCGGCAGAGATAACTATAAGACACCACAGTGCTTAAC
TGCCTTTTAACCAAAGACCAAAAACACTCATGAAGAAGAAAAATGACAACCTTTTTATAG
CTATGGACTGTCCATTTCATACGATTCCAGTTGTTAATACTTTATGCATGAGTCAAATAG
AATTTGCATACAAAAAAATAGGTCCATTTGCAACAAATCCGAGTATAACTGAATGAACAG
ATGAGAGCCATTAAAACCTTAATGTCAAATCCTACAAAACAATTGGATCATCTCCACAAT
GCATGACGTAATTCATCTCATGCTGTAAATATATCAGTCTGTGGTTAATATGAAAGTTAT
AGATTAAAGATTCACAAGACACAAATGTGCCTCCTGAACTTCCTAGAGCAGCATATCAG
CTAAAGCAAAGAATAGAAATACACTAATACAGAACAGCAAAGAGAGACTTAATAGACCT
GAGTTCCATATTTTCAATGCGGATACGTTCAACATATAAGTCATGATCTTCTGCTTCACT
GTTGATCTCATCGTCTTTTTTGGGATCCTTTTTGCGCCGTGAACTTGATCTCCTCGAAAA
TAGTCTATCAATCCTGGCAGCATAAGAACCTAAGAGTGCTAAGACACAATGCATTCACT
AAAACATTGAAAAAAGGCCCAAAACAGAGGCAAAGTGGAGATGAACTTTAGAATTCTAT
CTTCACATTTTCACCAGAAGGGTTCAGAAAGTTATAGGAACTTCATTTCAAGTACAATGC
AAACAGTAAACAGGTTTTTACTATACTAAAGTATCTAAAAGTCACTTACCTTGTTTTTCTC
AAAATCCATGCCCAAGTGCGTCCAATAATCATGTCCACTTTTTCCATGAAAAAGTAATCA
GTAGTCCTATCAATTCCAATGCCGCGTCGAAAGATTACATACTGGAAAGAAAAGGTACG
TATATAGAGATTCAGTGGCATGATCAAACTCTTGACTCTCATCCTTTTCCCTCGAGAAAT
ATATGTTCATATTACACATTGATATACTTAATAAATTTCGAGGTAAAACATTGATATACCA
TATAAGTTGAACAGCTCAAATACAATATAATACATCCATGATACTATTTGCAGGTTCAAAA
AGATATAAGTGACAACACGTGCACAAGTCACTCTTTACCTTTGTTGAAGCTTGTGTGCA
CTATTACAGGTTTGAGGAGCAGACCTTGAACAATGATTAATCTTTTGAAAACTAGCAAGA
AGATGAGAGGATAAAGATTCCAGTTTGTGCTCAGTCATAACACACTTTTTTGAATCCGTG
GTGAAAATAAAAATCTTTCATCAAAGAAAAAGAAGAAAGGGCCAGTAAGCACAATATAAC
TCTAAAGTTCTTCGCAATAAATGATCGCATACTTTTGCTTGTGTTTTATTGGAGTGCAAAT
TCCTTCTTGCCAAAATCATGGGCAGTAATGGACATCCTGACACCTAAGAGCTAATGTTG
TATAGGGACAGTGGTTACTTCAAGATTCACTTTAAACAGCCAATCATACTTGCTGCAAAG
CAACAATGAGATAGGGAAATAAATGGACACCATATGTGGATATCAAGGATTCAAGTCGC
ATTCTTGAACCCCAAACAATGCAAGGCACCAACAAAAAGCAGATTGGGAAATATTCAAT
TTGGTGAAAATTTCATAAATACAACCAGAAGCTACACTTGTCGACCTAGCATCTGGGAG
CCATTAACTTCATACCAAACGTTCCAGCAAAAGTAAAGGCCTCATTTCAAATTGTAACTT
GAAGCTACACTAAGAGATATACCTTGTCAGCAAACTCTGGAAGGTCCTCATGAGGATGC
TCTGCAAAATACTTCTCTAAAAGTTTTTTGTCAAGCTGCATCCAGGAAAAGGTAGAGTGA
ATCGCATAGCGAACATGACAAAATGGAACTATATCAAGAGAGCCAATAATTGTCGGAAC
CAAATTATATGCGGAAGCAGCTGGTTAAGAACCTTAGATTCATCAACAGTGATTGGAAG
ATTTAGAAGATACTGTCCTGAATGTGCAACATCAATCTCTTCATCACTAGCTATTTTAAAA
TTGCTTTTGTGCATAATCTGCATCAGCATAAGAGAAATGATGATAGAAAGTGGAGAATG
AAATAAGGGTGCCAGAACACAAATGTCATACCCATTTCCCTTAATCCTCCAGCTAGATG
TGGAAAAGCATTCAGAATTCACTGCACTTAGAGTTTGATGCAAGTTTAAAATCCATTACA
GGCTTGGCCTCAATAGCATGATAATGCAGTGCAAAATAACGGAAAACGACTTTAGCGAT
AAATGAATAATATATAGCCGTTCCCCATGCTTGAAAATAAAGAAATATCCCCTTCCATTT
CGATTTTGCAACAAAACAGCATAAATATGCGAAACTTTCTTATTGTAAGGCTACTCCTTA
TGATTAAAAATGGGAAGCATGTGTTAGAAAAAACAAAGTAAAAGAGAAAAAAAACAGGA
AAATGAAGGACGAAGCAACTCCCACTCCCTGAAGACAAAAACCTCGACCTCTTACCTTT
CACCTCACTGGTTGTCTCCCTCCCCTGAGAAAAAACAATTATTCGCTATGTCCCAATTTA
TGTGATGCACTTTCCTTTTTAGTATGTCCCAAAAAGAATTATACCTTACTATATTTAAAAA
AAAATTAAAACTTTCCATTTTACCCTTAATGAGATAATCTATAGCCACAAAAATATCTATG
ACTTGTTTAGACCACAAGTTCCAAAAGCTTTCTTTCTTTCTTAAATTTTGTGCCCAGCTAA
ACAACATCACATAAAATGGGACGGAAGGAGTAGTTTTTCCTCTCAATTTAATCCAATAGA
ATTTTCTTCCATTTCAGTGGAGATCTTACACTTAATAACTGATGCAGGATTATATCTTTTG
TTATATTTTTATTTCCTAGGCTCGGGAAGGAGAGGATAGCATGTTTTCACCTCCGCTGG
GGATTTTCTTTTGAAGGTACATAAATGTCAGGGCCCTCATACAAGGGTTGTAGATCGAA
AGTATTCTAACTATCTTCTTTTTTTCGGGTAAATTGTTGAGCCATGGGTACACACATACA
CAAATATATAGAGAGAGATATCTTCATATAAGCAACTGCAGACTATAAATATGCACACAC
AGAAGACAGATATGAGATTGGATTTTTTATCAAATTTAAACTGGAACACCAATATCCCGA
CTAAAGATACGCGGATACAATAGAATATAGCAGCTGATGGTGTTACTGAAAGGTCCAAC
ACGGGTGCTCAAAGTCCACTTGGGCAAATGCGGCTAGGGAGTCAGAAAGAATGAGATG
GGCGACGGACTTGCCCTACTGTCAGAGCTAGTGGTGTGTTCTTGAGATGAAGGCTTAG
CATTCACCACCTTCCACGTTTCCGACTTTCTCTTATTTGAACTTTTTAGATCAGTCAACTT
GAGTAAGCAACTTGGGCCAAGGGATGAAACTCAAGTCTCTAGCTCTCAAGTATACTGAG
TAGGCAACTTGGGCTTGCATGTTATACATATTTTTTTAACTAGTATACTGAGTAGGCAAC
TGGGGCTTGCATGTTATATAATGAATCCAAACAGCCCATATAGCTGGCTCAGGTACCAG
AGGAAAACAAACTTTAGATGAAGCTGCAGATTTTTTACCTGAAACAAATATGTCAAGAAA
TTCTGTTCAAGAATGTCAATCTCTTCTGGAGATAACTTCTGTTGTTCCAATTTCTTAGCC
CCGTTCACAGGATCAAACAAAGAGTATAATTGCTGCAATCAGACAAATATTATTGATCAA
AACACAATATCAACATCAGCATATTATATTCATTTGCAGCAGACTGATGAGAAAAGATGT
CTGATCAAATAAAAAGTAGCATAAGATTATATTACCATGAGATCCTCAAATTGTAGAAGA
TACCAAGCATGAATTGTGTACTCAACCCTCTTGCAAAGCTTCAGAAATTCAGCCCGGTC
AGAACTATGTTCTGGGCAAGGAGGAAGGTCGGATCATTAGAACCTCAAAAAAGACTTTT
ACTTAAATAACCAATCATAAAAAAGCACTAAAGGGACTAGAAGCACAGATATTCATGCAG
CATTTTACAGTTTCAAGAAAAGTAGATTTTCTGAAGAAGAAAAAAAGAGTGGAAATGAGC
TGCCAAGACGCAGACATGATTTACGTATATCCAGAAGGAAAACTTGTTTCTGTTAAAAAT
TCTAAACATATAACACGTCAAAGCTTATCAGTGAAGGAAGGGTTTTGAAACCTTTTGGG
GATTTTGATCCATGACCATCAAGTGTCTCCGTAAAATTCACATGGAGGGTGTACAGGGT
CCCCCCTTCTTTTGAACTGGGGTCTCCTCCTTTTGAAATGTCCAGCACTAATTTACTGCG
TTGTTTTTACTGTGAGTAATACTGTTACTTATCTATCCAAAAAATTACATAGAGGGAAGTC
GTTTCAAAAGCTTACAATTTCTTGAAATCCATGAGGACTTGATGAAAAGATGGAAGCCTT
TCTATTTCGGTTAGAGTTTATATGCTCGAGTGACCGTGTAAGGAGAAGTGTAAGATTTA
GACAATTCACGGTTATAGAGAAACCCTTATTTGTCCTAAAAGACAATTTATTGAGTAGTG
GAATGAAACAAGCCAATGGAGCAGAATGATAATGAGAAAATCACATAACCAACTCCAAC
TAGTTATGAATCAGGGTGGAGTTGCAAAAGTAAAATCTCTATTAAGCATCTAATTTCTTA
AATTCAAGAGATTGTGAACTTCTGAGTTGAGTGAAAGTGACTTACTCTAAGAAAGTATTT
AATGATAAAACTCGCAATTGAGATAAGTCAAATGGTAAACCTTGGAAAATAATCTAATTT
AATCTGGGAAAATATCTAATTCACACAACAGTAAATCTAATTAATCTGGGAAAATAATCA
AGGTCAAATTGTCTGCTTTGTCACAATACAATTAGAGTGCCTCAGAAAACAACATTAAAT
TTTGCAAAATTAAACCATTAAGGGGGTTGCTGTTTACACGAAAAAAGCTAAAACTCAGAC
GTCACCAAAACTATGAGATCGTGTAAAGTTAGTAACATTTTAGGTTTAAATTCATGGCAC
GCAATAATTGCTTGACATTCAGGAGAAAGACAAAAAAGTGACTGCCGTTCCCTATAGAG
TCTAGCGTAGAAAGTTGTATTATTTGCTTCAAAGATCTCCTCTTGGAGAAAGAAGCATTG
TTTCCTTACACTGCCATTTTCTATGGTCTAGTATAGGAAGTTCTATTGTTTGCTTTAAAAG
TCTCCTCGGATTATAGCAGAGTTGTACTTGTGCTAGTCAAATTTGGTAGTTTTTTCCACA
GAAGTAACAGAAAGTGAAAATATCAGAGATATTATCCAATTAAATTAGAGGAGAAGAATT
GTTTCAAAATTCAAACAACTGATCGACCACAAAATAGAGAGGGAAGAAAGAGTAGCCGG
TTGTTTGGGAGCATCCAATTTTTACCTATAAGGTCGGCGAGGGCCATGATGAGCCTGG
GTTTGAGGACTGGAATAACAGACTCGCGCTCCAAACGGATCACCTCTTTCTTCTTCTCC
AT
SEQ 53
TCACCGGTTTGTGACAACTGGATTTCCGTTCGCATCAGACAAATGGATACTCTGGGTTG
ACTTGTTAGCGACAACAGGATTTCCAGACTCATCTAAATTAATTATAGCAACATCACCAG
GCTTGAGATCCCCAGAAAGGAAAGATTCACTCAGGAGATCTTCAACCATTTGAGTAACA
GCCCTCCTAAGAGGGCGTGCACCGTAGTTTCTGTCAAATCCTTGTTGGCATATAAGCTC
CATTACTGCTTCTGACACCTCCAAGCTTATTTCCAATGAAACAAGCCTAGCCCTCACCTC
CTGCAGCATCAGGTCTAGTATCTGGAGCATCTGAAAGGGAAAAAACAAAGCAGTTACTC
GCAGTAGCCGACTGCTTTCTAAAGAGATGTGCCAGAATAAAAGATCACCCCAATGTACA
TTCAGTTATCAGATCAATGCAACTTTCCAAATCAAACAAGAGGTATATTATACGAACCTG
GGGCTTCTCTAGAGGACGGAATACTACTACTTCGTCTAGCCTATTCATCAACTCAGGGC
GGAAATATGTCTTGAGCTCTTCCATCACTATTGCTTTCATACCAGCATAGGAGGCTGCT
GATTCATCATCAGCAAGCAAGAAGCCAATAGTATTCTGTCTACCCTTTACTATGGCTGTA
GAACCCACATTAGAAGTCATCACTATCAGGGCATTCTTAAATGACACTCTTCTTCCCTGT
TGAATCAAGTTTCATAATTATCAACGCCAATCTTCCAAAACAAGGTTTACACCCCATATT
GTGGAACATTCTAGAACAATAAGCCAGATGTAAAAACGGATCTAACCTGAGAGTCTGTT
AGGTGACCATCTTCAAACAACTGAAGGAGAATATTGAATATGTCAGGATGAGCCTTTTC
AATCTCATCTAGCAGCACTACAGTGAAGGGCTTTCTTCTGATAGCTTCAGTAAGTGTTC
CTCCTTCTCCATAGCCTACATAACCAGGAGGCGATCCAATTAACTTGCTCACAGTATGC
CGCTCCATGTATTCACTCATATCCAATCTTAGCATGGCAGATTCCTGTGCAACACAAAAA
GATACTTCACTGAGTACATAGAAATTCACAAAACCAAGTGATTGTTAAACTGAAACAGAA
CCGAAGATAGCAAATATAACTCTAGCAATTTGATGATGAACTTCTAAGAAAAGTAGATGC
ATAACTCTTGATGATGAAATTCTTTTTGATAAAATCCTAGCCACAATTTTCATCTAGAAGG
TTGAACAGAGAATGTCGCTCAGATGAATTTGATTTGATTCAATCTCTGCACTGAAGTCAC
AAACCGTCTACGACCAAGAGATCCAAATTCAGTGTGATGACAAGATTAAAAGCAGCGCT
AACTATATGACTATGATCCATTATCAAAGCTCACTTAGTACTTTTCATTTATTTTGCOW
TTACGTGCCTCCACCATAGGTGATTAGAGACTCCTTCTGTTCTTTCTTTTGGGGCGGGC
TGAGAAGGGGTGGAAGGTGCAAGGATCTAGTAAATGTAACAGACTTATCAGATATATAT
ACAATGGTTGACTTCATTTCCCATTGAAATGGATGAAGGAATAATCTGATCCTGGCAACA
GGGAAAGAGATTTGAAATAAGCCAGTAATAGAGCACTACCTAGTACCTAGTATGTCTAA
ACTTGAAGTACTTATTAGTGCCCACCAATAATCAGAAGTCGTGCTCCAACAAGATTAATT
GGTGGTATTTCCAACGCTACATTTGACCATGCCGCAATAGCCATAGAAACCTAGAATGG
ACACACAGCACAGCCTCCGGTACCCTTTCCTTCTCTCCTTTTGTTTTTATTATGTGTGTC
CGACCACCTAAAACACAGTCACCACATCTTACTATCATAGTATAATACTTTCTTTACCCG
AATCACCACTACCAACAACATAGAAAATTCCCAAGAACACCAGAACCAAAAAAAGTCCT
GAGAACACCAGTACTATCACCAAAACCTATCCATTGTCACTGAAGTGGCTGGATTGCAT
AACTTCAGTGGCAAAACATGGTGACTGTCTGGTGAAACAATTAAGGCATCTAGAATGAA
AAGATGAAGCACATTTCTTATCTTACATAATAATTCTTCTCAAATTTAGACAAACTAAAAA
GAGCAAGATTGTGTTTGTGCAAATTATGCTGCCAGAACTCTTGGTCAACACGATTCAATT
TCAGAGTTCCACAATTTCTACTCAATTGCTTAATCTGGAGACGCATCTTTGGAGGAATAA
TGCAAAACAGCTCATTTTATTAATACTTACAGAACCAAAATAAGACGCTGCCAAAGCTTT
AGCTAGTTCAGATTTTCCAACTCCAGTAGGACCACAGAAGAGCATTGCCGAAATTGGTC
TATTTGGGTCCTTAAGACCAGTTCTAGATCTCTTAACAGCCCGACAAATGGCTGCAACA
GCCTCATCCTGACCAACAACCCTTTTTTTAAGCTGCTCATCAAGACCAACCAGAAGCAT
TCTTTCATCAACAGTAAGCTGCTTAAGGGGAATGCCTGTCCAGAGTGAAGCAACTGCTG
CTATTTCCTCAGGTCCAACTACCGGAGGTCTAGAGTAAAAATCAAAGGATTTAAGTTAAT
TTACTTCTGATTTAAATTTATGACTTCAGACAATCTTTATTCTACTATAATGCCCTTGTAG
GAACATGGAGGCAGATACGTACTCATCTTCATCAGATGTAGAAGGTGATGCTGGCTGTA
AATGAAGTTCACTGCCATCATTCAAACGAGATGCATCATCATTTTCTGTCAGCTTGCTTG
CCAAGATCTGTTTATGGAGGGGGCACAGGTAATTGTATTTAGACCACATAAGGAAGTTC
AAATTTTTCAAGACGTGCAAAATCTAGAGAGTTTGTATAACATTGAGTACTATTACCACTT
CATGCATGGCTTGAACAGCTCTAATCTCCTGCCAATAATCACTTGGTGATTGTGAGAGT
ACAGATATCTGCTGTTCCTTTCTTCTTTTGTGAGCTTGCATACGAGATTTACTACCAGCC
TCATCAATAAGATCAATAGCTTTGTCAGGAAGATACCTATCCGGTATATATCTTGCTGAC
AGTTGCACAGCAGCATTTATGGCTTCCAAACTGTATATACACTTATGATGTGACTCATAT
TTCTCACGCAATCCCAACAGTATCTGGACAGCATCCGCCTATATAATTTAGGAAACAAG
AATATCTGTTAGGGCCTTAGACACCCACTTGAGCATACACATGCATAGAGTATTATTCAC
CTGACTTGGTTCATTAATCAAGACAGGCTGGAATCTTCGGGCAAAGGCCTTGTCCTTCT
CAATATGCAATCTGAACTCATCCATGGTGGTAGATGCAATACACTGTTACAAGAACAAAA
TTTAAGCGCAGAGTCCATAAAAGCCAACATTATGAATGCAACTACATGGAGTAATGCAT
GGAACCAGAATAGGAAATTACCTGCAGTTCGCCCCGCCCAAGTGCTGGCTTTAGCAAA
TTAGCAATGTCAAGACCAGAACCCTTATTTCCCCTTCCAACTGTACCAGCACCAACAAG
GATGTGGACCTCATCTATGAATAGAATGATATTGCCTGCAAATTATGTCACAAGCTAAGC
CAATGATCTAAGAATTTGACCAAATTTTACTTCCATTCTATGCTCACCTGACTTTTTGACC
TCCTTAATTAATGTAGTCACACGCCCCTCTAGTTCGCCCCTCTCCTTTGCACCTGAAATG
AGTAGGCCAATGTCTAAAGACATTACCCGCTTTTTCTGTGTATATAGCAAATAACCACTA
GTTAAGTAGGTGCAGCAGCTAGTGGAACAAGAGTATAGGAGATGCATATTAAATTACAA
AATAGTTCAAAGAATCCCTGGAAAAAAAATGAATTCATTGAAAAGCCCACCATTAAAAAT
GCAGGAATATTTCCCTCAGCAATGTTTATCGCCAGCCCTTCGGCTATCGCTGTTTTCCC
AACCCCAGCTTGACCAAGCAGAATAGGATTGTTTTTGGTTCGACGGCAGAGAATCTCGA
TAATTCGCTGAACTTCAATCTCTCTGCCAATTACTGGGTCTATAAGGCCCTCACTCACAC
GGGCAGTAAGATCTACACAGAATTGCTCCAGCGCATTTTTCTCTGCTGGAAATGAAATG
CATTTGAGACAGCGTGCCAAACCAAACACTAACAAGAGAGAGGAACTGGCCATACCTTT
TGCTTTCTCAGCGGATCTGTCGATAGTTATTTTTCCAGGAAAGGATTTCTCACGCGACC
TTTTGAATGAAATTGGCTCTCTACCATCTTTAGCAAGCTCTCCTTGAAGCCTGGAAACTG
CCTCAGCTGCCAAACGATTTACATTTACTCCTAACCTGAAATTAGGTCAGTCGACCATG
CAAATCTTAATTTCTTATATAAATAGCGTGTAATAGATGACAGAAAGATAATCATATTGCA
AGAGAGAAGGCATATTAAACTCAATCAGGAAGGTGAAGAAGGATCCTATTCCCAAGCCA
GTAGCATTGTAAGATAAATTATGCAGCAAAAAGGAAATCCGTAAGCATTTGTTTATTTAT
TAACAAGTACATCAGTATGCTTGGTTTAGAGCACAACATGTGCTCATGCATAGCGTTCC
ATCAGAAACAGAAATTGCTTATCAACAGGAGGTCAAAATATTAAGCTAGGGTTGTCAGG
CGTACAACTTGAAAAAGAATATGTACACATACATGTACACAACACAAGAAGACACCAAAA
AAAAAAGAGAGGCAGATACCATTCATAAGTTAAGAACAGAATACTAAGGTAACAACAAC
AATCCAGTGTATTCCCACAGAGGATAAGATGTACGTAGCCTTACCCCTACCCCGGAAAG
GCTGAGAGACTGTTTCCGGTAGACCCTTGGCAAACCAAAATATCTCTTGGTATTTTGTAT
ACGCTTGGGAGGGAAAACAACACCAAATGGAATGTAAAATATGGCAAGCAAGGATAAAT
GAGTGAAGGATAAATTCTACCAATAAGTTCATTGCTTCCTAGCAACAGTGGGAGACAAC
ATCTCATTCCTCCTCAATTGTAGAAGCTGTTTTGGACTCAAAATAAGCAACAATAGCTAA
TCTATTCATGATCCCAAGATTGTTTCAGCTTACCAAAAGCCTATTACTTTTGTTCTTAATA
ACCTCATCATCCACTACTAGAGGCAGATGTAGTGCTTGAGTTAAAGGTTCATCTAAACC
CATTAACTTTGGTTCAAACTTGTATGTATGTTAAAATATGCACCAAATAAGTACAAATAAT
ATATTTCAAACCAAGAATGGGCTGCGGAACGCATATTCAAATCGTTGATCTGCCTCTAA
CTACCTACTTGCTCTACCAAAAAAACTAGCAGTTCCTATACTGAAAACAAAACTACTTGC
CAAAAAAAGTTAAGAAAAAAAAAAGCATTCTTGACTGACTATCTGTAATACCTCTTGAGC
ACACGAGTGGCGTTACCATCATCAACAGTAAACAAACCAAAGGCCATATGCTCGGGAG
CAATAAAATTATGCCCCATGGTCCTTGAATACTCAACCGCAGCCTCAAAAACGCGCTTC
GTACTTGAAGAAAACGCCACATCAGTAGCCGACGTAGCAGAACCGGAGTCCTGAGAAG
CCAATTTTTCTTTATCATCCTCCACGTCATCATGCCATATGCTCCGAACAGCTTCGCGG
GCTTTATCAATTGTTATTCGAGAACCAAGGAATCCACCAGGGCTACGATCCTCTGCGAT
CAGACCCAGCAAAAGATGCTGTGTATACACCATATCTTTGCCCAAAGCCTTTGCTTCTTT
TTGAGAAAACATCACAGCTTTGATTGATCTCTCAGTAAATCTCTCGAACACTCCAGAGAC
AATATACAAAGAGOGCTTGATTTTACGAGGAATTGAGCTGCAGGGCCTATGAGAAAGG
GAAATTCCAAAAAGGGACGAAGTAGAACTGCTAGTACTACAAGCAGCGGTAGTGGCGG
TAGTAATAGTAATATGAGAGGAGGAAGAAGGGCAATATGGGAAAAGCGAAAACACGGT
TTGACATCTCTTGTGAGGGTACACAGAGCCATAGCGACGAAGCTGAGGATTGAAGCTG
ATTGTTGAGTTCACAGAAAGTGGAGAAGAACACGTTAATTCCAT
SEQ 54
ATGAAGAATATCGAGCGTCTCGCAAATGTTGCTTTATTAGGTATGGTTTCTTTTGATTTT
GATTCATACATTATATCTTTTGATGATAGCTGAATTGCATAGTATACTTGTTTGATTTGTG
CTTGTGAAGTTCAGAAAGTAAAGTAAATCCTGTTTGATTTATAGCTTCGTTTTTTGCCCC
TTAGTTTGTGTTGGTTACTCATTCAGATCATTTTTCCGCTAGATAGATTGCTAAAGCTTTT
GATGCTAATTCTTTGTTGTTAATTGGAAGGAGGCTACCCTTCCAGGGTAGGGGTAAGAC
TACGTACATCTTATCCTCCCCAGACCCCACTCGTGGGAATTCACTGGGTTTATTGTTGTT
GTTGTTGTTAATTGGAAGGACTCAATGTAGGGAAAGGTGCTAATTATTGTGTAGTTGGA
ATTTGAGGTGTGGTTGATGGTTACCCTAAATATATCTATCCAGCATGTTGGAGTAGATTC
TATAGCGGTTGGAATGAATATTCAAATCCCCTTGGGCAGTCACATTACTACTGTTACCC
GCTTTCCTTTATGTCACAGTAGGTTCCACTTCCACAGTTCCAGTTCAATCGGTAGACAAA
GATGGTCATGTGGGTTCTTTATATCAGTTTTAGCATTTTCTTATATGTTGGATGTTTGTTT
CATCATATTGCCTTTTTGAGGACATTTCACTACGTAATAGCAGCTATGCCGTTCTTGGAA
ATTTACAATGTACGATTATTTGGTCATGGCAATTTCACATCACTTTCCAAATTTTATGTTG
ACGCAATTACCTTGAAACTCTTGCTTTTTTGGTGGATTTCAGGTTTGAGTCTGGCACCAC
TGGTGGTGAATGTGGATCCAAATGTAAATGTCATAGTAACAGCTTGCCTTACTGTCTTTG
TGGGATGCTACCGTTCTGTCAAGCCTACTCCACCTTCAGTATATCTTCTGTACTCCAAGT
TGCAGCTTCCCTTTTTCTTAGATCTGTTTTGATGTCACTTAAACATATTCTACTGCTGTTT
TCCAGGAAACAATGTCTAATGAACACGCAATGAGGTTCCCCTTGGTTGGAAGTGCAATG
CTCTTGTCATTGTTCTTGCTTTTTAAGTTCCTGTCAAAAGACCTGGTTAATGCCGTATTG
ACATGCTACTTCTTCGTTCTTGGCATTGCTGCACTTTCGTATGTTCTCTCCGTATGGATC
ATTCTGTGATGCTTAATATTTTCTATAACAAGTTCTTGAATAGTAGTTTTTCTGTGGGTGT
ATTGGATGTCATCTCTTTCTTTGTGTCTTTGCAGGGCGACATTGTTACCTGCTATCAGAC
GATTCTTGCCCAAAAAGTGGAATGATGATCTCATAATATGGCACTTCCCATATTTCCGCT
GTAGGCACCACCTTTCTTGTCTCTTTTGAAATGCCAATTGATCCTTTAGAATCCTTGGGC
ATACAGATCTCATCTTAGTTATTTTGTTTCGTCTTTTTTCAGCTTTGGAGATTGAGTTCAC
AAGATCTCAGATTGTTGCCGCAATTCCTGGAACCATCTTCTGTGTTTGGTATGCTAAACA
GAAGCATTGGCTAGCTAACAACGTTTTGGGCCTTGCCTTTTGCATTCAGGTTTGTCGGC
ATATCCATCCAAGTTACATTCTCATTCTTCAGGATATCTCAAAATGAAAAGTTGTGTAAAA
TAGTATTATTAGTACAATGGTAATATACAATTTTGGATATTTCAAAGTGAAAAGAGTATCA
TATAAATTGGGATAGAGGAAGTACTAAGACACTTGAATGAAGAGATCATATTTCATCACT
AAAAAAGTTGCACTTATCTGTCCATACATGTTCTCGTAACCAAGCATGGTTGCTCTTTAA
TACCAGATGCAAAGGCTACCCGCCTTTATATCTAGCATTTAAATCCACGATAGCACTTGA
TGGCTTCCTCTTTAATTTGTTTGATAACTAGAATTCTCCCAGGAGTTGGCCTACATTTATT
AAACTATGGGAGTATAATAGGCCTCCTCTATCATGCTCCCACTAATATAGCGGCTCCTT
GTTAGTGATAGGGTTCTAACTCATGACGTGGACCCATATTCTGACATTGCGTCATTACAT
TGAACCGGAGCCCCAGGGGCTTACTATTTGTGATTTTCTATTTATATATACATTGAGTTA
ATGGAGATTTTTGCAAGGGAGAAAAGGTTTGATCCTCTCTTATGTCATGTCTACATCAAT
GATTGATATTGATTTTCCCATTGCGATTTTGATTTTCAGGGTATTGAAATGCTTTCACTTG
GATCATTTAAGACTGGCGCCATACTATTGGTAAGAAAGAAAATTTGTTTTCTAATTTCTAT
CTGTAATTATACATGGCTGACAGCTGTATTCTGTTTATGTGTTTCGCCTTAAACTACATAT
TGCTTGTCTTTTTGAATTTGATGCTAACCACATATCTCTTTATTCAAGCGGGAAGAGAAT
TTCATGAAATGAGCTATTAATGATTGTTATTGTTGAGCTATTAATGATTTTACATACAAAA
ATACATAACATTTGCATGGATTATCCCTAATTGCAGAGTTTTTAGACATTTTTGAGGTATT
CTTTTATGTTGGCATTTTTGCTTGTTTATGCAACTATTTATATCCATTAACTTGTAGCTGA
TGTTGAATGCACATGGTTTTCGAGAATGCAGGCAGGACTTTTTGTGTATGACATCTTCT
GGGTCTTTTTTACCCCAGTGATGGTCAGTGTTGCCAAATCTTTTGATGCTCCTATCAAG
GTGTGCATACTGATTTTCTCATATAGCTATTTCTTTTGAATTTTCATTTCATGCCTTTATTA
GTTACAGAGTCCTGATTATAACTTCGCTTTCTCTGCAGCTTTTGTTCCCCACAGCAGATG
CTAAACGCCCCTTCTCAATGTTGGGTCTTGGAGACATAGTTATCCCCGGTATAACCTCC
ATTTGCGTGAAAACTCCATTCACTTTATGTGGTTAGAACAGAGAGGTTTAGCATTTTGCC
TAGCGGAGGGATCCTCCACCTCAAACCATGTGGTTTGGGGTTTGAGGCAGTAGGGAAA
CGGTGGGAAAAGCCACTGTTGGTCCCTGGAGGGGAAAAAATGGGGGTGGGTGGGGG
GATGAGGTTTACCATATTAAAAATGAAAAGCTTACTTTTTGTGAGTAGCTACTTGAATGT
ATTTTTCTGTTTCTTACACATGCTTATTATTAGCTTTTGCCATGATGCTGTATTTGTTTTCA
TTTTTCAACTTGTTTTTTGCTTGAATAGATACACTTGGTAACATTTGATCACTTCAATCAT
GCAGGTATTTTTGTTGCATTGGCCCTCCGCTTTGACGTTTCCAGAGGGAAGGGGCCCC
AATACTTTAAGAGTGCATTTTTAGGATACACATTTGGTTTGGCTCTTACCATATTTGTTAT
GAACTGGTTTCAAGCTGCACAGGTTGGTGAATCAAAATAAAGCTTTTACACTTTATTTCT
CTTGCTAGAATTGCAGCGCCCTTATGTTTGACTTGGCCTTTGTTTTTTCCAGCCTGCTCT
GCTATATATTGTTCCAGCAGTGATTGGATTCTTAGCCGTACACTGCATATGGAACGGGG
ACGTGAAGCCTGTACGTTTTTTCTTTTGACAATCTGTTTCAACTTCATCCACTTGCTAACT
TTACTGTTTATGTTCTTTATATGCTGTTTACTACCATTTTAGCTACACACTATTTGTAGATT
ATATTTTCTAGGAGTTAATAGATATGAGAAAATGCATCTTATGGTTTACCTTTAATTCATC
CAAAGAAAACATGCATGTCATGATTTGTTTGGAAACTATGGACAATAAGTTAAAGGTAGG
GAAGGGAAGTTTTCTCGTTTCTTCGAGTTGGAAGCAAAAAAGGACGATCAAGAACTTCT
TTTTCGCCTAACCTTTGATAGAGAGAGTACAAACCCAAACCTTCATTGCCTTTTCTAGTT
TATACGGATACAGAGTTAACGAAATTTTCGTTTATGGAAGTAAGATTGGGGTCTATTCTC
AAGTCGTAGAAAATTACATTTTCGTTTTGATGCTGAGTTTGTATTCTTGATTTTCTGTTGA
GCAGTTGTTGGAGTTCGACGAGGGAAAGACGAAAGGCGCTGAAGAAGCCGATGCCAA
AGAAAGCAAGAAGGTAGAA
SEQ 55
CTAATTTTGTTTGAGATCTCTATAGTACTCTTCTAACCACTTTTGAATAATAGCCACTTCT
TGCTTCCTTTGCATGATCAACCAGCCAGGGTCATTCTTTGTCTCAGAACGAAAGTCAAC
ATGGTGTGCACCTAATTAAATAAGAAAAATTAAAACATGAAACTAGTAATAAAATAAATCA
ATGTCTCTAATCAACAGCAATCGTTTTTCATTATGCTTTAATTCAATGAATATCATGATAT
ACAAAAGCATATATTACACAAATAGCCGGTCATATAGCCGATGTACATAGATTATACAGT
AATTATATATAGTTATACACATTTTATATATGAATTATACATAAATTGTACATGCGCTAGTT
ATTTTTAATTTAAGAAATCAGATCAGTGGCTATTTGGGTTAACTCTTCGTACCTTTTTGAG
TTACGAGTGCCACAATGCTAGCTGATATATTTTTCAGCACACTGTCACAAAAAGAGAAA
GAAAAAAATCAATTTAATAACAATAAACAAAGACTTATTCAAGATTTAGAGTCTATATGAG
TTTATAATATAAGTCGAAAATAATAGATTCAATTAAAACAACAGGACTTTACCATCACAGA
TAGATATAGGACCACATTTAGTGGTTTTAATTGTATCTATCTATTGTTTTCCACTCCAATT
ATAAACTCATATGGACTCTAAATCTTGAATTTACGAGTCCTCACATTATTATATTTTTATTT
TTAAATTTTGAACTCACCCTCCTCTGCTCCATGGATCTTGCATTCCGTTAGAGAATATCA
TATTACTGCCAAATCTCTTAAGAACTTGCTCAATTCTCTGAAATATAAACATATTTTTTTTA
ATTTCTTATTTTCGTGAATAAAAAAATATGTAAAGAGAATTTTCATTTGTTAACAAAAAAA
GAATGTAAATTAGAAAACTTACATAGCCACCAAATTCAGTAGTGATCCAATGTGGTCGA
GGCTCTACTCCATATTTCTTTTTGCAATCTTCTTTGAATTCCTTGTAACTATAGGAAGATG
GAGGAAACATGCTTTCATTTGAACAAGTCATTGGCATAACCATCTCTGTACATGCCTTAC
TCAAAAACCATGGAAAGAAACACACTAAAATTAGGCATACATTAGACCAAGATTTCAAGA
ATCATTTAATTTTAATCACACCATAACCAAACTAAAGTTTAATATAAGTACCAGTGGCGAA
TCCAACAATGCATTTACGGATTCGATCGAACTTAGTATTTACAGTATAGAAAAATTTGTAT
ATACGACAACAACATATCAAGCCCACCAAGCAGGGGCGTACGCATGAATTTTTGTAAGT
GATGTCAAAATTTATAGAAGAACGGGAATTATAACTTTAATTATCATACTTCTAGACAAGA
AATAACTTTAATCTATTGGTTTTGTTGAGTCTTAAGTTAGAAAAAGTCCAGAATTAAATTC
TACTTCATGACAGTTTTAACCACATAGATTCTCTAAAATATTTGCAAAAAAAAAAAAAAAA
AAAAAAAAAAAAAAAAAAAAAAAAGGAAAGCAAAAGAAGCCTGTCAGTTCTCAAATTCAC
AACTTACAATTGAACAGAAACAACCTTCTTTTTTCGTNAGCAAAATCAAGCACATAACCA
ATGCATCAAGAAATAATTTATGTCAAGTGGTGTCATTTTTTTCTACTTATCTGCTTCTTCA
CAGTATTAACACATATATTTAGTAAAAAAATTCGACGAAGCGGTGTCGCGTGACACCGC
TTCGATACATCTGCATCCGCCCCTACCACCAAGTGGGATTTGGGGGGTGGGTAGGACA
TATGCAAACATTATCCCTACTTTTGTGAAGGAAAAAATATTATTTCCGGTAGACCCCCAA
CTCAAAGAAAGATAAAAAGAGATAGAAACAACAAATAGTAACAATCACAAGATAAGGAG
ATAAGGTGATAGAATAATGAGAGATAGAATAACATTTAATAGAAAAATCTGCGAATAAAA
AGCTACAAAAATACCATACTAAAAAAATACGTATAGATAGAGTTAGATATATTTTTCAAAA
TCTACACGTTTAAATTCTGAATCTGCCACTAATAAGTACAAAGAATAATAAATGGAATAG
AATAAAAGGTAATTAAGGTAAAGAATTCTAAACCTGCCAATCCCAACCACGAAGACCAT
GAGCATCATCACCACCTTCTAAATTGAAACATTTTTCTCTTTTTGTATAATTGTAATATAA
ACTTGCCGCAGCAAATGCCCGGCTGATTTTGGAAGCTCCTTTTGGTAATCCATCAATTA
TCTTGCACATCTTAATTTAAAAAAAAAAAAAAGTTTAAGAATTTTTTCACTCGACAATATA
ATTTTTTTACACAATTAGTCATTTATAAGATAATTACAAATAAATTTTTATGATAAGTATTA
ATTGATGAACTGATAAAAATGATAAATAACCTGTTATAATATGTTAAACTACACTAATCAT
GTACAAAATCTCCACATTGTCATTGCATTAAGTCTTATGTACAAATGGTATAAAAAATATT
TATGCCAATCAGATAAATTATAAAGTACCTACAAGTAACCTTTGTGATAAACATTAATTGG
TAAATGGCTAAAAATTGTATCTAGCATGTCATATCAGATTAAACTATACCCACTTTTGTAA
AAATATTTATCCTGTCAATTAGGGGCGGACCTACGTGGGGAGGGGTCACTAGACCCCG
TCAGTCTCGACAAAAAAACTGTATATAAATTTCATATATATCTATATATACAGTAAAGACG
CCTTAAATACTTTATGCGCCCCCCTAAAAGCACAAAAACTGGACAGAGGCACTGGTTTG
TAGGAGTGCTTAATCCAAGTTCGAATCTATGCTCCTACAACTTATATTTTTTATTTTATTT
TTAAAGTGGTGTCGCCGTAATACTCAAATCCCAGGTCCGCATCTGTTATCAATGTATATC
AAGTTCAACAAAAGTTGATCAGGGGCGAAGCTATATATCCCAAAGGGTAGTCAACTGAC
CACCCTTCCTCGAAAAATTTACTTTGCGTATATAGGTAACATATTAGGTTTTAGAGGTAT
ATAACATATATGAATACTCTTTATTAGAGAATTTTTTCCACTTCTTTAAGTTTGAACACCC
TTGAGCCTTGAGAAAATTACTGATTTCGCCACTGATGCTGATAGAAAAAAAGGAAATGTA
ATTAAATGCAATGATTTTGAAACCAATTTAGTGCTAATTAAGCAGAATTGTCTACCTCTTG
TACTGGATATGCTGGCAATGGCATCATAAAGTTGGCTTTAGTAGGATAATTCACCATTG
CTGTATATACAAAAGCTTCCCATAGCCAATCTCTAGCTGAATAAACTGAATGTAAACCCC
TGAAATATAATATAAAACAAATCATTTTATTGAATCAAACTTGACCTTGTAATTTGCTACA
ATAAAAAATTATCATGTTTCTATTTTTATATTCAAATATACTTACTTGCAAGTTCTGAAAAG
TTTACTAACTTCAGTCAAGCCTTCTTCATGTTTTGATAAAGCATCCAACTCTGTCCAACTT
CCCTTTATCACTCTATAACAATTCAAGCTTACCTCCTATTCGTGAGGGCAAATAAATAAA
TAATAATAAGGTCTCTTATCCAAGAAAGATTTTTATGAATATATCCTATTCGAGATAAAAG
ATAATTACAGTAATCGCTCATAATAAAGTGAGATTAGTAATCTGCAAATAAGTCAAGTTA
CTTGTTACAACATGTTGAAAATATTGAGTGTAAAAATTTATTTACATTGTCAATAACGGTG
GATCCTGATGGGTTCATCCTCTAGAGTTCAAATAATTTAAGGGTTTGTTTGGCCATGATT
TTTTTTTTTACTTTTTTTTTGGAATCAGTGTTTGGCGATGAAAAATTCTAACATTTGAATTT
CTAAATTTTTTCGAATTTGAAAAACTTCAAAAAACTATTTTTCAAGATTTTCACTTCAAAAC
ACTTAAAAAAATTTAAAAACAACCCCAAATTATATTCATGTCCAAACACAATTCTAATTTT
AAAATACCATTTTCAACTTGAAAACAAAAATTACTTGTTTAAGGAATTTCACAATTCTTAT
GTCCAAACACCCACAAATTTGTTGCGCTTTTAGAAGTAGAGTTTCAAAATTTAATATTTAT
TAAAATTTACAATCTTTTTGCATTTCTTTATAAACCTAGTAAATAAGGCGATATTCGTCCC
AGTGTATATAAATTAAATCCTATTATAAAAGGAGCATCTAGGTGCATGAATGTGACCATG
TAGGATCAGAACATTTTAAACAAAGGGGCTTAATAGATTGTAAAGGCTTTACTATTACTA
ACGACAAGAGCGGGTTGCTCCAGTGGTGAGCACCCTCCACATTCAATCAAGAGGTTGT
GAATTCGAGTCACCCCAAAAGCAAGGTTAGGAGTTCTTCGAGGAAGGGAGCCGAGGGT
CTATCGGAAACAACCTCTCTATCCCAAGATAAAAGTAAAGTTTACGTACACACTACCCTC
CTCAGACCCTACTAGTAAAATTTTACCTGGTTATTATTGTTGTTGCTGCTTTACTATTACT
AACCTTGAAATCTTGGGAAACAGCATCATAAAAGCTTGACCATGGGGTGATTTTGTCAA
ACTGCAAGATTGGTGCTGAAGATGCCACTGCACCTATTGCTATATGTGGGTACTTCAAT
CTAAACCAAGAAGCCAACACTGGTTGACCAGAAAAAACAAAGTTAAAAGAGGAAAGGAA
AACAAGTATTTAAGAGTGAGAGCAATTTATTAATTATTGGATACTACTCGAGAAGAATGA
ACCTAAATAGCCGTTCACTCAACTGCTTAAACTAAAATAGCTGACGGATGTATAAAATAG
GAAAATTTTATTTTGTGTCTCAGACAACTTACACTAGTTGTATGAAGCATTTTTTTTATCT
CACAGTTTTGTGGACCCGAATTTTTGTGGACCTAGAAGTGTAAGATTGGGGTCCACAAA
TTTATGAGACAACAAAGAGCCTCGCACAACTAATGTCAGTTGTGTGAGGCACACAATAA
AACTTCTCTATAAAATATATAATTCATACTCTTATATAATACACCATCCGGTCCACTTTCA
TTGATTTTTTGACTCTTTTCACATATATTAGAAAATCACATTTTAGCATTAATTCACAATGA
AATTGACCATATTAACCTTATTTTGTTCCTTGAAAATATAACAAATGCTCCTATGCTCTTT
ACTTCAAATGCAACTTTAAAAAAAAAATTAACTTATTCTTAATATCTGGAAAAAATCAAAT
ATTGTGGACCACAAAAAAAATTAAAAATTCAATTAAAATTGACCGGAGAGAGTATATGCA
TAACTATGTATAATCTATATATATCGGCTAGAAACAAACAGTAAATTGAACTGGCTATTTG
TGTAAAGATTCCTACTTAACAAATGCAAAAGTGGAAGAAAAGTTCTGTTTATTTGAATAAT
TGAATGCATCTAATGCTAATGCTAAATTCATACAAAAGAGAACTTTCCATGAACATTTAG
CAACCATAGAATGTAATTATCATTGATTCACATGGATTGGACACTCAATAAGTCAATATG
TCCACACATGTAATGTCATGTCATTTCCATCTATCATTATGTCAAGGCAAAAAATTAGCT
AAAAGTTAAAACTTTTTCACTTATATTATTACTTTTCTTTCATTACTTTTTTTTTGTTTGTTT
GTGTGGTGTTCTACTATATTAGTGGCAGTTTGGACATAAGAATTGTAAAATTTCAAAAAA
AAAAAAATTAACAAAATTTAAGTAAAAATAATATTTGAAAATTAGAGTTGTATTAGAATAT
GAACATAATTTAAAGCTGCTTTTGATTTTTTTTATGAATGATTTGAAATGAAAATTTTGAAA
AACAGCTTTTTGAAGTTTTTAAAATTTTCGAAAAATTCCAAAATTCAACTTCAAGTGAAAT
TTAAAATTTGCATGGCCAAACACTGATTTCGGGAAAAGTGAATGTTTTTTATGGCCAAAC
AGTTCCTTACTTACTTCCTCCATAAGAGCCACCAAAAACCACAACCGGTGATGATTCAG
AAGAAAGATTCTGCTTTAAACTCCTTATTAGAACAGCATAATCAGCCAATGCTTGCTGTG
AATTCAAGTATCCCAAAGTCTTTGGTGACTTGTAAGATTTCTTTCCAAATGGCATTGAAT
CCCCATAAAACCTATGCTAAATTATTACAATACAAAAAACCATTATCAATTTCATTCCCAA
CAAAGATAAATAATAATAATAATAATAAAATATAAAAAAGGTTCAATTTTACCTTTCTATAT
GAAGTATCTTAATATTACAATTCATTATACTTTGGGCCACTAATATCTTATTTTTGGAAAA
AATTCTTGTATTTGTCTTGATTCTAACGAAGTTCCAACTTGAAGTATAATAGATGGTAATT
TTAAATCATAGTGAATAGCTGGATAAATTTGGATTTTTTCTAGTAGTATTTTGATACGTAG
AATCTACCAAATCAATATTGGAGTTTCATTAAACGTAGTATAAATACGATTCGATTTAATA
ACGGCAAGAATATAAATAATCCCTTAAATAAAACGAAGTGTAAAACTAAAATACTTCGTA
TAGTACAACAACAATAAATTCAGTGTAATTTCACATGTGAAGTTTGGGGAGGATAGTGTG
TACGTAGATCTTACACATATCTTGGGAAGATAAAGAAGTTGTTTTCGATAGACCCTCGG
CTCAACGAATAGTGAAAACAAAGTAACAAACAGTAGCAACAACAACATAATATGAACAAA
AGGCAAAATACTTCGTATAGTATAGGAGTAAATTTAAATATTTTTCTCAAAAATAAATACT
TCAAATAAAAAAACATTTCAAGATTATATACATACTTCAATGAAGACTAGAAGAGCATGA
AACTTAGGAGCAATATCAAGCATAAATCCAGTATTTGCAGCAAACCAATCAATATTTCCT
TCATTTCCAGTGTAGACAAAGATAGGGCCTCCTTGTTTCCAATAATTATCATTTATGAGA
TATTTCTGTTTAAAAACTTTAGAACTCTTTGGTAGAAAAGTGAAATGGTCAAGAATTTGA
GGAAAGTAATGGACTTTAAATGGTATTTTTGACTTGACATGTTGTTTTTCTAATGAAGATT
GATAAGTTCCAGGTAGATAAATTGGCTTAATTTCTCCAACTACAAAAGAGATAATAAACA
GTAAAATCAAGAAAATGAAAGAAAAATAAGAAGAAGAAAAAGCCAT
SEQ 56
ATGTCTCGTTTCTCACTCCTATTGGCTCTCGTCGTCGCCGGTGGCCTTTTCGCCTCCGC
ACTCGCCGGACCGGCGACCTTTGCCGATGAGAATCCGATCAGACAAGTCGTTTCTGAC
GGTTTACATGAGCTGGAGAACGCAATTCTCCAAGTCGTCGGCAAGACCCGCCATGCTC
TCTCCTTCGCTCGCTTTGCTCACAGGTACGATGATCTCTACATGGAAATGAGATTTTTTT
TTGTTATTTGCTTATTAATAGTAATTGTTTTATTTTGAGTTTAAGTTCTATATATGCAGTGA
GCATATTTTTTTTTTTACATAAATAAGATAATAACAAATAAATCACTTAATATGTATTAGTT
GGTAATGATAGTGTAAAAAAATATTATACTGTAATGTGTATATAACTTAAATCTTTTTATTT
TTGGGACGATATTTAAGGTATGGGAAGAGGTACGAGTCAGTTGAGGAGATAAAGCAAA
GGTTCGAGGTATTTTTGGACAATTTGAAGATGATTCGATCGCACAACAAGAAAGGACTA
TCATACAAACTCGGTGTCAATGGTATAATTAATATTATGGCATAACGCTAAGGCCCTGCT
CTTTTCCTTTTTTCTCTTTTGCTTAAGTGGAGTCTTAATTTGTTGATTTGGAGGTAACAAG
TTATAGTTTTGTGGTTCCTTTACCGGAATACTCTTTGTTTTTATCTTCAGCTAAGGTAACA
GATTAAGGCGTAATTATAGTTATTATTGTAAAATAAGGTAATTTTTATTTAGAAGCTTCAA
AATTAAGTACAAGCAATTGAATACTACTCTTTGTAAGTAGACTTTGTATATATGTTTTTAT
TTCATTCTCTTTTTTCATTTGGAGAGATGTGGACAAATTAAAATTATAATATAATGCGATA
AAACATATGTTCCACTACAGTATCAGTATGGTATTTATAGTTTGCATATTTTATTAGTAAT
TAATTGGTCTAGTGCCTTATCATGTGTAGATATTTCATTCATATTGTGTGGCTAGTGGGT
ACCCTTTCTCTCTCCAATCAAAAAACTTTTTTTAAAAGCTCAATTCAAAAGCTTTTCTTCA
TTACAACTGATCCTGCTTAAAGACTAAAAACAATCTAAATTGAATTCTTAATTCTTCTCTA
TTCATTCATATATGGACATAAAAACAAAATCACAGTACATGGAAAGAATATAAGCACCTA
AGCATTGGACTGCCCAAATGAAAAGTTTTTGCAACTTAATCTAGTTGTGCATAGATTCAA
CAACAAAAAGTAAAGAAATAAGTATGCATTTTATGCTTCTAAGTTCTAGTATATATGGCC
CTTATTGTTTATCGATTATTATGTTTCATGACAGAGTTTACCGACCTAACATGGGACGAG
TTCCGGAGAGACAGGTTGGGGGCAGCTCAAAACTGTTCAGCCACCACAAAGGGCAATC
TCAAAGTCACTAACGTTGTTCTGCCGGAGACGGTATATGCACTCAGAACTCCTCTGTAT
CTATTTCTGGAGTTAGTGATCATTAGAGTTAAACTACTTTCTGATGATTTATTATTTCCAG
AATTGTGGAGTGCTCTGAGTTTAATTATGCTGTAACTATAGAAACACTAACTAAAAAGAT
CTTGAATAGGTATCCTACAACAATAAATAGAATCCTCATAAGAAATACCACTAGATCGAG
CACCAGTCATGATTTCATATCTGGTAAAAATCTTGGCTAATTGATCGAAGTGGAGTAGAC
TAGCGAGCATGTACTGAGCTAATGCACAATTGGTTGCAAAAAGAAGTTTTTTCTTTCCTA
ACCGAAATTTCCAATTTCGTAATTATAGAAAGACTGGCGGGAAGCTGGGATTGTCAGCC
CAGTCAAGAACCAGGGCAAGTGCGGATCTTGCTGGACATTCAGGTAAGAATTAGTTAG
AATCTCACATCATTGGACTCTTAAATTGTAAGTCTTGAAATTGCACTCTTAAGCTGAAATA
TAACGGAGAAGGCACTTGGCAGCACTACTGGTGCACTAGAAGCAGCATATAGCCAAGC
ATTTGGGAAGGGAATCTCTCTATCTGAGCAGCAGCTTGTGGACTGTGCTGGAGCTTTTA
ATAACTTTGGCTGCAATGGTGGGCTCCCATCACAAGCCTTTGAGTATATTAAATCCAAT
GGTGGTCTTGACACTGAAGAAGCATATCCATACACTGGCAAGAATGGCTTATGTAAATT
CTCATCAGAAAATGTTGGTGTCAAAGTCATCGATTCCGTCAATATTACCCTGGTATGATA
TCTCTTTCCTCCAGTATGCAACCAATCTTTGCCAGTGTTAATATCCAACCTTAATGGTCA
ATAAGGATTGGTTAAGTTCCTTACATACGTGTCATTACAGGGTGCTGAAGATGAACTAAA
ATACGCGGTTGCATTGGTTAGGCCCGTTAGTATAGCTTTTGAGGTGATAAAAGGTTTCA
AACAATACAAGAGTGGTGTTTACACCAGCACCGAATGCGGCAACACTCCCATGGTAAGT
CATCTGTCCCTAGGAACGTGATATGCAAATATATTGACATAGTTACCTAAATACAGGGG
AAAGCTACAGCCGACCAAGGGTCGTCAGTTGAACACCCTTCACTTCACTGTCGTGCATA
TATTAAATCTTGAACACCCTAAGTGAAATTTATAACTTCGCTAAATAGGCATATACACAAT
ATTACAAACATTGTGTGTTGCATTGGCAGGATGTAAACCATGCTGTTCTTGCTGTGGGT
TACGGTGTTGAAAATGGTGTTCCCTATTGGCTCATCAAGAATTCATGGGGAGCAGATTG
GGGTGACAATGGATACTTCAAAATGGAGATGGGAAAGAACATGTGTGGTATTGCCACTT
GCGCATCCTACCCTGTCGTTGCC
SEQ 57
ATGGAGAAGGAACACAAATACTCTTTGTTTCTCACAAAGTTGAAGTTGTTTTTTCTTGTTA
CATTAAGTACTTTCCATGGCCTTAGCCATGGCTTCCAAATGGATCAGGCACGTACATTA
ATGTCTTGGCGTCGTTCTAAAATGCATGCTCAGACAACTACTTATGCTACTAATGAGGAT
GAGACAGAAAACTTAGTATTTTCCGATGAAAAACATGTCGGAAATATGGAGGATGATCT
TATTAAAGATGGTCTTCCAGCGCAGCCTTCAAATGTGATGTTTAAGCAATATGCAGGATA
TGTTAATGTTGATGTAAAGAATGGAAGAAGCCTTTTCTATTACTTTGCTGAAGCTTCTTC
TGGAAATGCTTCTTCAAAACCTCTTGTTCTTTGGCTAAATGGAGGTAAATTATATGTGTT
GATGATTCTTTCTCAACTTAATTTTGTCTTACTAATTACTCATCTTCTCTTAATTCTTTTGT
CATGCACCTAATTTGATTAAGTACTCATTTGTTTTGTTTCGATTTAATCTAACTTACCCTT
TATGCACATATATTCTGCATCAAATTAAGTTGAATATTACTCCACGTGTTCCACATTATAT
ACTTAACATTTTTTTTTTCCAATCTATTTTACACATTTTATATATTTGAATACTTTTTTAACT
TTAGACATTTCAATTTACCCTTAATAGTATATTCTTGTAGCCGATCAAATATCTATGAGAT
ATTTTTGAAGTCTTTTTTCTTCCTAAATCAAGTCAAATGTTAATGTATAAAATAAAGCAGA
GGGAGCAATAACTTTCGTTTTATGTTTGTAATTTTTCTTAATAGTGATACTCATTACTCTC
CCCGGTCCACAATAAGTGACTATTTTACTTTTTTATTTTGGTCAAAAATAAGTATCCATTT
ACCTAATCAATAAGGAATTAATTTTATTTTTCTAAAATTTACCCTTATTTACATATTCCAAC
GTGTCAAGGAAATAATTAATTAAGGTTAATTTAGTGAATATATTTTTTTTCTCTAAGAGTT
CGTATTTCTTTAATGGATGTGCCAACTATAAAATGGTCACTTATTAGGGACCAGAAGAGT
AACTCTTTATTATTTGAAATTTTGATTTCCCAAAAGGTATAAATGGTCCGAGGAACATCTA
ATTTTCGCTCATTTGCAAGAAAGTGGTTCATAGACAAATGGAGTTATTAAGTGGGGACG
CGCAACAGAGAATTATTGGTCACTTTATTCGTTTTGTTCGCTCTTTTTCTTTCTTTACTTC
TTTACTAAAGTAGAAGAGAAAAAAAGGAAGTTTAAAAAATTGTTAGTGTATATGAAGATA
AGAGCTGTCATTTTCTTCGGCTATTGAATGACGAATAAAAGCACAATTGGGTACAGGTC
CAGGATGTTCATCATTAGGATTCGGGGCCATGCTAGAGCTTGGGCCTTTTGGTGTAAAC
CCTGATGGTAAAACCCTTTATTCCAGAAGATTTGCATGGAACAAAGGTACATTTCATTTG
CTAAACTAATATAGACCTACTTATAATTAATGAAACTAATTTCTCAAGAAATAAGACAACT
ATTTTTTGTAATAACGTATACTCTATCTTTTTCAATTTATGTGACAACATTATGTTAAAGGT
GTCACGTGAGTAGGAAGCCAGCTGACACTTAGTAGGCAAAGAGTCTGTTAGATTAGTTG
TTAATTATACAATTAGAAATTAGTTAGAATCAGTTGGATTACATTGTATATGTATGTGTAT
AGACGGTTATTCAATACAACAGTAATTTTCTCATCTTCTCTTTTCCTCTCTAAGCTGCGAT
CTCTCTTAGCTCAATCTAGAAGCATCCACGACAGATGTTTGGCATGGTATCAGAGCTTT
GTGCGATCATTGCTCTCGTCTAATTCTCCTCTGAGTTCATGTGAACGAAACTTCAACTCG
TTCGTCTTCATCTCCTTCCCTCGAGAACATCGAATCGACGATGACGACGGAAAAAATTG
ACCACATTCATCCTCTGTTTGTGCATCCCTCAGATACTCCAAGTTTCATGTTGATTCCAG
TCCAACTCACTGGATCTGAGAATTACGAATTATGGCGGAGATCGATGAAAATTGCACTT
AGGCAAAACGAAAGTTAGGGTTCGTCAATGGCACACCCACTAAGGATCAGTTTAGGTCA
GAGCTACATGAAGACTGGGAGACATGTAATGCGATTGTGCTCTCGTGGATTATGAACAC
AGTATCTCCAAATTTACGTACTTAGTGGAATTGTGTATGCTTTTAATGCTCACCTAGTAT
GAGAAGATCTAAAGGAGATGTTTGATAAGGTGAATACGATGAGGATCTTTCAATTTCATA
GAGAAATTGCTACAATTTTCCAACGAACAGATTCAGTGTCCATGTATTTTATAAAATTGA
AGGAGCTCTGGCTGAGTATGATGCAATGGTACCCTCAACAAATTCGAAGTAGTATGCTG
ATCATCTTCAGCGGCAGAGGCTATTACAATTTCTAAGTGGACTGAATGATTCCTATGCTC
AAGCTAGAAGACAGATTCTAATGAAATCAGTAGAACCTACTTTGAATCGGCCTTATGCTC
CAATTGTTGAAGACGGAAGTCAAATGAGTACATCGGGAACTTTATCACACATTGGGCTG
AACTCAATAGCCGAGGAAAATGACATTACAACATTGTGGAGCTCAGCAGTAAAATGAGG
TTCAATCAAGAAGAACAAAAGGAATTACAGTATATTTTGTGAACATTGCAAGATGAAAGG
ACATAGTAAAGAAAATTAGTACCAGCTCATTGGTTATCCGACAGACTTTAAAGATAGAAG
AAAACAAGGAGCACCTACTGGTTACCAATGAGCACCTATTGGTCACCAAGGAACAATTG
AGGAAGATGCAATGCAAGGGAAACAGGTATGACTGTAGATTTTGGGAATCTTTATGCAG
GCATATCATATGGGGACAACAACATATGCAGGTGCAAAGGCAAGGGACTCATAATCCT
GTACACATGGAAGATGCTCAATCTCAGGGACAATCTTAGGGATATACAGGTGGTGTCAC
TGTTATATTTACTCCGGAACAGTATAGTCAAATCTTACAAATGCTCAACAAAGATTATGTT
CCAGAAACATCAGCTAATATGGCAGGTACTATTTGTTCTTTTCTGGCTAGTAAAACCGG
GCACAATTGGATAATGGACATAGGAGCAACAGATCATATGGTATCTACTCCTTAAATGTT
ATTTGATTTGAATGACTATGCTAAGCAAGGCTCACTGTTGCATTTACCTGATGGAAAAAG
TTGCCTATTAGTTATGTTGGTAAATGTAGATTGGCACAAGGGGACATCAGGGATGTGTT
GTGTGTACCAGACTTCAAGTTTAACTTGTTGTCAGTGGCTAAACTAACTAGAGAATGCA
GTGTTTCATGTCTTTCTATCTTGATTTTTTTCTGATGCAGGACCTTCACATTGGGAAGGT
GAAAGGGACTGATAGAATGCACAATGACTTGTACTATTGGAGAAATAATATAGAGAATA
AGATACCACAATCATTGGCTACTACTTTGACTCAATCTGCAGCATTGTGGCATAAGAGG
TTGGGGCATGTTCATCATAGAATACTACAACAAATGAACTTTTTTAAAGATATCAAGACA
AATACTGGCAGAACTTGTTCTATATGTCCTTTAGCTAAGCAAACTAGGCTTTCTTTTCCT
CAAAGTACTAGTGGAACTACTACACTGTTTGAGCTAGTTCATGGTGATGTATGGGGTCC
ATACAATGTACCTACATATGGTGGTCATAGATTCTTTCTTACACTTGTAGACGATTGTAG
CAGGATGGTCTGGGTTTTCTTGTTAAGGTTGAAGAGTGATGTCTCATTTGTATTAAAAGA
TTTTATGTCATTAATAAAGACACAGTTTTATAGTTCAATCAAGGTTTTCAGAAGTGATAAT
GGTACAGAGTTATTTAACTCACATTGTATAGATTTGTTCAGTGGTGCATGAATTGTACAT
CAAAACTCATGTGTTCATACTCCACAGCAGAATGAAGTTGTTGAACGAAAGCACATATAA
TTTTTTGAGGTAGGAAGAGGTTTCAGGGTTGCATTCCTCTAACTTTCTGGGGATTATGT
GTTCAGAATGCTGCGTATCTGATTAACAGGATTCCATCCACTACTGTGGCAAGAAAGTC
ACCATTTGAGGCATTCTATAGGAGGAGTCCTAACCTACAACACCTAAGGGGTGCTTATG
TTATGCCATAAGTGTGGGTGCCAAAAGTGACAAATTTGGAGCAAAAGCAATCCCAACAG
TGCATATGGGATACTCTACCACTCAGAAAGGCTATAGGTTGTATAACACAGCCAATAAA
CTGATCTTTGTCAGCAGGGATGTTTCATTTAGAGAAGATATATTTCCCTTCAAGTCCTCC
TACTATCAACTTAGACCACCTAATCTTGTGGAGTATTGGAATGGTCGCCATGATCCCTTT
GTTCTTGAAACTACTATTGATGCAGCTCCATTGGAGACTTCATCTATAGTTGAGCCAGTC
TTTGTCCCCTCTAGTCCTTCTATTCCTACTTCTTTGAATTTAGGAGACTCTACAGCTGGT
GTCTCTGAGAATGCTACTACTGTATCAGTCCCTGCTGCTAGTACTGATTCTCTCATTCTT
AGTAAGGCTCCTTATGATAATGTAGCAGATATTACTGTTGCTCCAGATTCTTGAGAGCTT
ACAGTCACAAGAAAGTCATGCAGAACCTCCAAGACTCCTAGTTGGCTTAGTGACTATGT
TCATAAGGGGTCCAAGCCTCTATCACATGCTGTAATGGGCACAAGTTATCCTTTATCAG
TATATATGTCATATCCTTCACTTTCAGACCCCTATTACAAGGTCATTTATAGCATCTCATC
TGTGAGGGAGCCTGATACTCATGAAGAAGCTCTTTATGATCCACAGTGGGTAGTAGCTA
TGCAACAAGAACTGCAAGCCTTTCAAGACAATCACACTTGACAGCTGGTTAATATACCT
CCTGAAAAGAGAGTCATTGGTTGTAAATGAGTATTCAAAGTCAAATACAATGCTAAAGGT
GAGGTGGATAGATACAAAGTTCGTTTGGTAGCCAAGGGATATACTCAGCAGGAGGGGT
TGGATTACTAAGAGACTTTTTCTCCTGTGGATAAGATGGTCACTGTGAGGACTATCTTAT
CCTTGGCTGCAATGCATGGTTGAAGGTTGCATCAAATGGATATATTCAATGCATTCCTC
CAGGGTGATCTTGTAGAGGATGTTTACATGGTTCTACCTCCTGGTCTTCTAGGACATGG
GGGGGAGGGNNNNNAGGGGGGGGGGATGTAGGAGAGTATGCAAGCTACATAAGTCTA
TGTGTGGCTTGAAACAAGCCTCTCGACAGTGAAATCTTAAGCTTTGTGAGGCACTTCTC
TCCTCAGGCTTTATTCTAAGTCATCATGACTAGTCCCTCTTCACTCAAAGATCAGGGAAT
GAGCTGTTCCTCATCCTAGTTTATGTGGATAACCTCCTCATCACATGTTCTTCTCCTTCT
CTCATTCATGCAGCTAACTCATGCTCCATCAGCATTTCAAGATCAAGGATCTGGGGGAG
ATGAGATACTTTCTTGGTCTTGAAATTGCAAAGAGCACAATGGAATACTAGTATGTTAAA
GAAAGTTTGCACTAGCTCCTTATTGCAGACTTATGAGTGGCTGCTTCTAAGCCTACTAG
CATACCTACGGAGGTCAATCAAAGGTTCACTAGTGAATAATTTGATCACAACTATAAGAC
TGAGGGCAATACTGATGAGTTGTTGTCCGATCCTACTGGCTATCAGAAACTAGTAGGGA
AGCTGCTATACCTAACAATGACTCGACCAGATATAAGATACACAGTGCAGAACCTGAGT
CAATTTATGCATAAACCAAAGAGATCACACGTGGAAGGGGCTCTAAGGGTGGTGAAGT
ACTTAAAGAATGCACCTGGTTTGGGCATCTTGTTACCTTCTAAGCCATCCTCACAACTTA
CAGTCTACCGTGATGCAGACTAGGCCAATTGTCCCATGACAAGAAGGTTAGTTAGTGG
CTTCATAGTCAAGCTGGGAGACTCCTTGATTTCTTGAAAATCAAAGAAGCAAAGTACAG
TGTCAAGAAGTTCAGCAGAGGCATAATACAGAAGTATGGCCAATGCAATTGCAGAAATA
GTTTGGCTCATTAGACTGTGTGAGGAACTGAAGGTGAAGCTGGAGTTGCCTGTTAAACT
ATATTGTGATAGCAAGGGAGCACTTCAAATTGCTGCTAATCCTATCTATCATGAACGAAC
GAAGCACATAGAAATCGACCGTCACTTCATTAGGGAAAAGATACATGAGGGCATTATAC
ACACAGAACATGTGTCCACAAGTTTGCAGCTGGCAGATATTCTAACTAAAGGTTTAGGA
AAGGCGCAATATGACTTCCTATTATCCAAGCTAGGAATGTTCAATTTGTTCATATTACAT
AGCTTGAGGGGGAGTGTTAAAGGTGTCACATGAGTAGGAAGCCAGATGACACTTAGCT
GGTAAAGAGTGTTAGATTAGTTGCTAATTATACAATTAGAAGTTAGTTAGAGTCAGTTGG
ATTACACTTTATATGTATGTGTATAGACGGTTATTCAATACAATAGTGAAAATAATTTTCT
CATCTTCTCTTTTCCTCTCTAAGTTGCGATCTCTCTTAGCTTAATCTAGAAGCATCCATG
ACAGATGTTTGACACATTACTATTTGGGGAGCCAAAGAGGTTCTTCTTTATCATGTGTTT
TCTTAAATGTTTTATAAATATTTTGAATTATAATTTTTTTTATGAATTATAGTACTTTTTATG
TAAAAAAAATGAATTTGTATCTAAATTTACGGTGTAAAGTAAGCTAGCGTTTGGCCATAG
ATTCCCAAATTTGTTCTGAAAAATCTGATTTGGGTGAAGTTTGGTTTGGAGATGAAAATG
CGTTTGGACATCAGTTTTCAAAACATATTTCCCAAATTTATTTTGGAAAAACATGAAATAT
GATTTATACCCACAAGTTCTAAAAACTATCACAAATACCCAACAGTACCATTATCAATAA
CATTCATTAAAAAACTTTGATTCTCGTAAAAACTTTGATTATCAATCACAAATATCCAAAT
TTATTTTGGCAAAATCTATGGTCAAACGGGTATTAAGAACTTTGATTCTCGTGCTATGTA
CCTTGCCCGGAATGGAATTGTACGGGTATTAGAAAAATACATTGTGCTGCCAAATGCAT
TGTACAATAACTATAACTACTTATAGTTATTGTATGTTTTTTCTTTCTTTTATTTATTTACAT
ATGTAATGATGGTATACAGTTGCGAATGTGATGTTTCTGGAGTCGCCGGCAGGGGTTG
GGTTCTCTTATTCCAACACTACCTCGGACTATTCAAAGTCAGGCGATAAGAGGACTGGT
ACACACCGAAAAATCTCGTTAATACAATAGTAATAATTGTCAGTTTCATTATTATTTTTTTA
AAACAATTTTAACAGTCAAAATGATGAAATTTTACTCTTTCATTTAACTCCTCAACTTCAA
TTTCAACTTCACATGCTCTATTCGTCAACACTCAACTCCAATCAAACATTGTGCAAACAG
TTATATTATTATCGTTTGTAGTCTGTAACTATTTTTTAATTTTTTTTAAAGACTACACTTGA
GTATCGTTAAAAACATGGTCAAATCTTTTGGTCACTTAAAGTGAGGCAGAGGTGGTGTC
TTTTCTTATCAAACGAGATTTTTCATTTTTTTATTTATCATTAATTCAGTTATATATTTATTT
CTTTTCCTTAAACTATATTCTTTTTTATTGGGTGACAGCTGAAGATGCATATAGGTTTCTA
GTGAATTGGTTCAAGAGGTTTCCACATTACAAAGGCAGGGATTTCTACATCATGGGAGA
AAGCTATGCAGGTATCTAGTACAGTATCAGTAATTAACAAACGAAAAAATACAAAACAAA
AACTTTTGATATTCTTGACTTATCCTTCTAGTAGTGAGAGCCCTCATTATTGAGTTCTGTC
CAATAAAATTTGTAAGAATTAAGGACCACTGTATCAGAGACAGCTTGTGCATATTTCAGA
CCATTCACAGAAATGTCCTCCTGTACAGTCTCAGCTCAAAGCCGAAATGAGCATTCTGA
TTGAAAATTTTGGCTATATTTGTAATACAATCTTATATAAGTAGTCTATATCTAAAGTCTAA
TATTGACATGACAGCTAATATTGCTGTGACTGCTCATCACAGGATTCTACGTACCAGAG
CTAGCAGATATCATTGTCAAGAGGAACATGTTGCCTACCACAAACTTCTACATCCAATTC
AAAGGAATCATGGTATTATATCATTTAATTTGTTGACCTTTTAATTTGTTTGATCTCTCTG
TTATCAAATCTTACTTGTATACCTAGTGATGAGGGGCGGATTTAGGGGTGCAAGGGTGT
TCACCCGAATCCCTTCGCCGAAAAATTACACGGTATATATAAGAAAAAGTCTGATATTTA
CCTTTATATATTATGTTTTGAATTTCCTTTACACAGCCCAAAAGTCTACTCTATGTCATGA
CATAAATTATTTCTTTATATTGCAGATAGGGAATGGTATAATGAATGATGAAACAGACGA
GAAAGGGACATTGGATTATTTATGGAGTCATGCACTAATCTCAGACGAGACTCATCGAG
GTCTCCTACAACACTGCAAAACGGAGACCGAAACATGCCAACATTTTCAGAACATAGCA
GAGGCTGAGTTGGGAAACGTCGATCCTTACAACATCTATGGTCCCCAATGTTCCATTAA
TTCAAAGAGCAGATCTTCTTCTCCGAAACTGAAGAATGGATATGATCCTTGCGAACAAC
AATACGTTCAGAATTATCTCAATCTTCCTCATGTGCAGAAGGCCTTGCATGCTAACCTCA
CTAACCTTCCTTATCTTTGGAACCCATGCAGGTAATCCAACTAAGTAAATATTATGTATA
GCATATCGATTTAACTTATATATACCGATAGTATAAACAATTTTTACACTGTCGTTGTATA
TGTATTGATTTATATATATACACTGTTAGTGTAAAATGTGTTGTAACAAATAATCTATGTT
ATTTTTCTATTTATAAATTAAATTCTACTTTTTATAAATAATAACTTGTACTTATCTTTTTGG
TCACCTGATAGAAACTCTTTTATATCATCCAATGTGTATTTAAATCTGTTGCGGCAATGAT
ATTTCTTATTTTCAAGATTACAAAATCTCACTCTTTATGTTTAGTTTATGTCACTTTTAATA
TGTAGAAGGTAATTGAACTCATATAAAAAATAGTGTATATGATATGATATGATGATTTTTT
TTCTTTTTTTTTTTTCATTTGGTATGGTAGCAATTTGGATTGGAAGGATACTCCAGCAACC
ATGTTTCCGATATACAAGAGACTTATTGCATCTGGTCTACGTATACTTCTTTACAGGTAA
CTTTATTATGGGCTTATCTTAGACTTTGGTTTATGTTCATGATACAATATTTTTAATTGTTC
GAATAAAGAACAAGTGGATTTGTATTGTTTGGAAACAGTGGAGATGTTGATGCAGTAGT
TTCAGTTACTTCAACTCGCTATAGCCTTAGTGCTATGAACCTTAAGGTGATCAAACCTTG
GCGTCCTTGGCTTGATGACACACAAGAAGTACGTTCTTCGAATATATTTTTTAATGATAA
TTTTATATATTTGTGGTGAGAAATAAATCTTATTGTTTCGTTCTTTGTTTTTTTTTTATAATT
TAAAGGTAGTTTGTATAATTTCTGCAGGTAGCTGGATATATGGTGGTTTATGATGGATTA
GCTTTCGCAACAGTTAGGGGAGCAGGGCACCAAGTTCCACAATTTCAACCACGTCGAG
CTTTTGCTTTGTTGAATATGTTCTTTGCCAATCATTCT
SEQ 58
ATGGCTAATTCTTATACAAGTATTAATTTTTTCCTTGCCCCTATTATTTTCTTGGCGATTC
TGGGATTGCAGTTGCAGAGCAGCGATGGTTTTGGGACATTCGGGTTTGATATCCATCAC
CGGTATTCGGATCCGGTGAAGGGTATTTTGGACCTTCATGGATTGCCTGAGAAGGGCA
GTGTTGAGTATTATTCAGCTTGGACTCAGCGTGATCGCTTTATCAAGGGTCGCCGCCTT
GCTGAAGCTGATACAGCTAATTCCACTCCCCTCTCTTTTTCAGGAGGGAATGAAACTTT
CCGCCTCAGTTCTTTGGGATTGTAAGCTTCCCTCTATGCATTTTTCTGATTGCTTTTTGC
ACTTGTCTATATCTTTATTGTTTACTTTTTCTAGTCATATACATAGATTATATACTAATTAT
ACATAATTATACATATATAATACAAAAATTATACCTTTTAAGTGGTTGGGTGGGCGGCTA
TTTGGGTTAATTCTTCTTCTTTTTTTGTATGTGTGTTTTGTATCTGTGTTATTATTCCTGAT
TGTGAACTAGTACGTCTTTGGAAATTCTTGTTTACTGTCTTTTCCTTTTGTCTGTTTAGTG
TGATGTTAGAGTTGACTGAGCTTTACGTTTGTTTTTGTCTGTTTAGTTGGATGGCAGTTC
AGGAAAAATAGGTTACCTAACTTAAATAAGTTCCATGTGCCATTTTTAACGAGATTCAAG
TGGAGAAAATATGAAGAAGAAAAAGAATGATTTAGGCCTGTTCTGTTCTATAATTCTGTT
TGTGTGTTTGATTGGACTGGAATTTTGTCGATTTAACTACTACATAAAATACTGACTCTTA
ATTTGATTTTACTTTTCTTCTATTTCGAATTCCAAGCTCCGGAAATAAATTCCGTTCTTTTT
TCTGATTTTCCTCTCCTCTGCCGCCACTTAACTCCTCTCCAGACAAGGAATTGTTCTGAA
GTTTCTGGCAGTAGCATGTTGTAATTTATGTGTTATAAAGATAGAGTTGCAAAATCTGTA
GTATCTGTAGTTGTGATTTTTTCTTCTTAAGGTGTGTGACTAAATATTCTTTGGCAATTTG
CAGTTTGCATTATGCAAATGTGACAGTGGGCACTCCTGGACTATCATTTCTAGTGGCAC
TTGACACTGGCAGTGACTTGTTTTGGCTACCCTGTGATTGCAGCAATTGTGTGCGTGCC
CTCGAGACACGCTCTGGACGAGTATGTTTGCTTCATTCTAGTACCTTTTTCTTTCTACTT
TCAAATGTTTAAAGAGTTTTTCTTTTTTTTGATCGTCATCCTCGTCTGTATATTGCCTTCT
GCTACAAGGAAGTTGTGCATACTTCTCTTCCTTTTGTAATTATGAGACTTTCTGATAACC
TTTTTCAGAAAGGAACCTGCTGATAACACAATGGCTGAATCTGAAACACAGTGGATTTCT
CTTCAACTGTCTTTTTCGGTCATTATGACAATAATATATTCTCTTAGTTAACAAGATATGG
GGTAGAGAATGTATTGAGGAAATTGTTTTTCTGTTAAGGAAGATACATAACTAGCGCAAA
AAAGAAGATTTAAACATAATCAATATTTGCAAAGTGAGTCTGATGCATGTAATATACTGA
CTCTGAAATGAAATTTCTGATCCATATTGTTCCGTGGCTTGTTTGTCCTTGAAGAATTTT
GAGATTCTTACTAGCTCAAGTACTTCAACTTGTCACGACCCAAAAATCCCACCACAGGC
GTCGTGATGGCACCTAGTCTCTAAAACTAGGTAAGCCGATTTCAATTACATTTTTGGAG
CCATTTTTTTTTTAATTAAATAAGTAACCAAAACTAACAGCGGAACAAATATGAATGTACA
ATCTCCCAAGACTGGTAGTACTAAGTCACGAACTCTAACTGAATACATGGAATGATCAC
GAGGACCGAATATACAATACTGTTTGATTAAAAACTCCACAGGAGTTCACCTTGAAGAA
CAAAATTTTCTTTGCTCTTTTGCCTTTTCCTTTTAATGTTTCTGCATGTATTATTTGACACT
TGTAATCTTTTGTTTGCTTTTGAAACAGCGAATAAATCTCAATATTTACAGCCCTAATACG
TCGTCAACGGGTCAGATTGTTCCTTGCAACAGCACTCTGTGTGGACAAAGGAGACGAT
GCTTATCTTCACAAAATGCATGTGCTTATGGAGTTGCATATCTCTCCAATAACACCTCAT
CATCAGGGGTACTGGTGGAAGACATCTTGCACTTAGAGACAGATAATGCTCAACAAAAA
AGTGTTGAGGCTCCAATTGCTCTGGGGTGGGTATGCTTTAGTTTTTTCTCTTTATCTTTG
GAAGAGATTATCTTTGGATCTTCTGATGCATTTCTTTATCCGCCATGATTTTTTATATTCT
ACTTGTTCAATTTCAGGTGTGGGATAAGACAAACTGGTGCATTTTTAAGTGGCGCAGCT
CCTAATGGTCTATTCGGACTTGGCTTGGAAAATATATCTGTTCCGAGCATGTTAGCAAG
TAAAGGTCTTGCTGCAAATTCTTTCTCCATGTGCTTTGGGCCTGATGGTATTGGAAGAAT
AGTCTTTGGAGATAAAGGGAGTCCAGCCCAAGGAGAAACACCACTCAATCTTGATCAAC
TACAGTAAGCAAGTCACTTTGATATTCTGGGTTTATCGGTTGCTTCTGTTTCTGGCTTGA
TTTAGGAGAATGCGACTGAATATTTATTAACTCTTACCCTTTCCTGAATTGCAGCCCAAC
TTATAACATCAGCTTGACAGGAATAACAGTGGGAAACAAGATCACTGATGTTGATTTCAC
AGCCATTTTTGACTCTGGCACTTCATTCACATACTTGAATGACCCAGCTTACAAAGTCAT
TACAGAGAACGTGAGCGACAAGCTGACTGTATGATTTTAAGTTGGAGTTTGTAACTTTG
TATTGTAAAACTGAAGATATTTTTTTTCTTTTTTCAGTTTGATTCTCAAGCAAAACAGCCA
CGTATTCAACCTGATGGCGAAATTCCTTTTGAATACTGCTACGGGCTAAGGTGAACCAT
CTTTTATAATCTTCATCATTTATTACTTTCTTGACGTCCTTTGAACTCTCAGGATTAACAT
GCTACATACGCAGTGCAAATCAAACTACCTTCGAAGTTCCTGATGTAAATTTGACAATGA
AAGGCGGCAACCAATTATTTCTTTTTGATCCGATAATAATGCTCTCGCTCCAGGTAAGAT
GGTTTCTGCTCCTTTTATATTACAAAAGTTCTCTTTTAGAATATCCTAATATCCAGTGATG
ATCATCAGGATCGTTCTGGCGCATATTGCTTAGCTGTTGTGAAAAGTGGGGATGTCAAC
ATCATTGGACGTAAGTATCTATCAGTTGCTTGCTCGTAAGATTTTGTTTCTATCCATGGA
ATTCTGCAATATAACTTGCACCATGCCAGCTAATGATCTCACAATTACCAACTTTTAGAA
GTTTTGGTTCCTATCGAGTTTTTTACATACTTCTAGCTTATGTATAATTGGAAATGTGAAT
GTGACAAAGTAAATTAGTAAAAACCAACTAGTAAAACTGGTTCCATTGTCAAAAGTCTGA
GCTATTTGTTGATTTACTTGGATTTTGTCTCTCTATTTGGAATTCATGACAGAAAACTAAT
ACACGGATGTTTTTGCAGAAAATTTTATGACAGGCTATCGCGTGGTTTTCGATCGGGAG
AAGATGGTTTTGGGTTGGAAACCATCGGATTGTGAGTTCGCATTCCTGAGTATGACCTC
TTTAGTGTGCACACCTGCTCATATAATTTAACTATAAACCTTTCTTGGCAGGTTATGATTC
TAGAGGATCCAACGACAAATCGACAACTCTGCCAGTGAACAAGCGTAATTCTACTGAAG
CGCCTTCGCCCTCCAGTGTGGTGCCAGAGGCCACCAAGGGAAATGGAAGTGGAAATG
AACCCGCTACTTCGTTTCCATCTGTTCAATCATCTAAACCTGCAGCAAACCAAGCACCA
GCACATTTCATTTGCCAACTTATGATGGCTCTGTTTTCCCTTTTTAGCTATTATTTGATCA
TTATTTCTTCA
SEQ 59
ATGGCGATTCATACTTCCACTCTCTCCATCTCCATACTTGTAATGCTCATGTTCTCCGTC
GTATCATCATCGGCGGCGGAGGACATGTCCATTATAAGCTACAACGAAAAACATCACAC
GAACGGCGAGTCAACGGTCTGGCGAACAGACGATGAAGTCATGTCTTTATATGAATCTT
GGCTAGTTGAACATAAGAAAGTGTACAACGCCTTAGGAGAAAAGGACAAACGGTTTCAG
ATCTTTAAAGATAACCTTAGATACATCGATGAACATAACTCTGTGCCCGATAAAAGTTAC
AAGCTGGGTTTGACCCAGTTTGCAGATTTGACCAACGAGGAGTACAAGTCCATCTACTT
GGGTACTAAGCCCGATGGTCGTAGCAGGTTGTTAAATACCCAAAGTGACCGTTATGCC
CCTAAGGTCGGAGATAGTTTGCCGGATTCCGTTGACTGGAGGAAGAAAGGTGTTCTTG
TTGACGTCAAAAATCAAGGGCAATGTGGTATTTTCCTTTTACCCTCTGCCTTGACTCTGC
ACCTGTTGTTTTTGTTTTCCTTTTTGTTCGTACTTATTTTCTGTTTAAAGTTTGTCCATGCT
TTCTTTACTGATGGCTTTGATGGAAATTTGGAAACTTTAGTAGTTTGATAAGGTAAGATA
TTAAAATAATCACAGAGTCATGAGTTTTAATCTAAGATCAATTTTAATGGCAAGTTCAGTT
GACCCTGCATTATTGTAAATTTTAGCTTAACATTAAGTATGATTAATTAGGTCAGCACGA
TGAAGTTGACAACTTTTGCTCCAATTTCCGCATCTAATTGTGGCAATATAAGTAATGCTT
TTTTCCCTTGGACAAAACACTAGTTTCCGGAATTGAGCTATTTTATTCAATTTAAAATGAA
AATTTTCTGTTTTAATGTATTAGAACTATAAAGAAACCGAAACATTAAGTAAACTTCGGAT
TGATCTGTGTTTTTCGGGAATTTAGTTGTTAGTGGTCTAATTTTCGGTTTAAATGCAGTT
CTTAATATTGGATAGGCATTTTGGCACTTTTCTTGGCTGTCGCTTCTCTTACCTTAAAATT
AAAATTATGGAGTACCTACCAAGTTCAAGATCTTATGGTTGTAAATTGAATTTGTAAAAG
GGGTTCTTCTTCGTTTGCTCTGAGATCCTTCTTTTAGCTCGCTCCTTAAATATTTACTAAT
CAGTGGTTTGTAGCTCCAACCGAGTGTCTATCGGAAACAAACTCTTTACCCTTCTAGGG
TAGGGGTAAGGCTGCGTCACTTGTGTGAACTCACTGGGTTTGTTGTTGGTCTGTAGTCC
GATATACCCCCATCAAACACCCTTGGAGTTGTTTCACTATGTCTAGTTGTGTCAATTGTT
TTGGCAAATTATGCAGCCTTGATTGATTGGATTATCTTCCATTTTATGCATAAGTAAATG
CTGAGGAAAAAATGATATGTTTATATCACATAAAGCAACTAATAATTTTCTTCGTAATTGG
TGTTGCAATTGGGAAATGAAACAGGGAGTTGTTGGGCTTTCTCAGCAGTTGCTTCAATT
GAAGCAGTAAACAAGATAGTGACAGGTAATCTGATCTCGTTATCTGAACAAGAGCTGGT
AGATTGTGATACGTCCGATAACCAAGGCTGTCAAGGGGGTCTAATGGACGATGCCTTTA
AATTCGTCATTCAAAATGGAGGAATAGACACTGAGGAAGATTATCCTTACAAAGCCAAA
GATGGAAAATGCGACCAAGCAAGGGTCAGTATGGTGTTCTCTGTCTTAAAGGGATTATA
GGAAATGAACTAAATACAAGTTGTGACTATTAATATTTTGTTTGCAGAAAAATGCCAGGG
TTGTCACCATCGACGGGTATGAAGATGTTCCTGATAATGATGAAAAGGCACTGAAAAAG
GCCGTTGCTGGTCAACCCGTCAGCGTTGCTATCGAAGCTGGTGGCAAAGACTTCCAGC
ACTATAAATCGGTATTACTTCAGATTTGCCTATTGTCAGTAAAGTTGTTTTCTTTTAATCG
AATTAGCTAGTGTTTACACAGGCTCAACAAATATTTCTGTATTTTCAAAGTTACAGTGAG
TTCAGTATTAAAATTTTTAAATGTTGATCCTATTAAGTTTAAATGTTGGATCCGCCTATGC
CCCAGGGTATCTTTACCGGAAAATGTGGTGCAGCAGTGGACCATGGTGTGGTTGCAGT
AGGGTATGGTAGTGAAAATGGCATGGATTATTGGATTGTGAGGAACTCGTGGGGTGCT
TCGTGGGGTGAAAAGGGCTACCTCAGGATGCAGCGAAACATTGGCAACCCCAAGGGTT
TGTGTGGTATTGCTACGATTGCTTCTTACCCTGTAAAGACAGGCCAAAACCCTCCAAAA
CCAGCTCCATCTCCTCCACCAGTCAAGCCGCCCACTCAATGTGATGATTATAACGAATG
CCCAGCTGGAACGACGTGCTGCTGTGTCTACGAGTACTATAAATACTGCTTTGCTTGGG
GTTGTTGTCCCATGGAAGGAGCTACTTGCTGTAAAGACCATAACAGTTGCTGCCCACAT
GATTATCCTGTCTGCAATGTTAAAGCAGGCACCTGCTCAATTGTAAGTGATCTCTGCTT
GTTATTGTTAGATTGTCCCGCATTGGTTGAGGGGAAGTGTTGTTGTCTCCTTATATAGTC
TTCGGCAAGTCTTTTTAACAGTTAAGGTTGTTTCCTTTACTTATGGAATCATGTTTTTGTT
GATACAGAGCAAGAACAACCCACTAGGAGTCAAAGCAATGCAGCACATTCTGGCCAAA
CCTATTGGTACCTTCGGAAATGAGGGAAAGAAGAGCCCTTCTTCT
SEQ 60
CTAAGCACTTTCTGCAAATCCAATTTGTGAACTGCCAAAGTCGAAAACTGTGTGATATGC
TCTCAAGAATGCATCTCCAAGAACCCTGCAAAAGTAGAGTTGAATATATCATACAACTG
GATCTTCATGAATATATAATATATTATAACTTATGGCAGTGAAAATAGTCTTACCAGAGG
GGACGTCGCGGATGCGCGTTTAAAGTTGTAAATCCACTAATACAGTGGACACCTTGGCT
GTCATCAACTCTGATAACATACTATTACACAGAAAGGAAGATAGTAAGTGGAAGAAGAG
AAAGCACTGCTATTTAAAACTATAATATGTTACTAATATACGGCCTAAAAACAAGACGCT
AACGGCTTTTCCAATGTACCTTACTGGAAAACCAGTTCAAGTTGTCGAAGCAATTTTAAT
CTACATTGCTCCGATCCTCCAAAAATGCTAACCGCACTCATGTTGGATCCTCCAAAAAG
TGCAATGAGATTTTTGCGGGATCCCAGCAATCAGTGGCGAATCCAGGATTTGAATTTTA
TGGGTTCAATCTTTAAGATTTTTAGTATTGAACTCATTGTATTTTGAAGTTATTGCTTCAG
TACTACTATTTATTAGATTTGACTGAACCCGGTACTAATATGATGCATCTGCCTCTGCCA
GCAACATAAATTTTAATGGGAAGATAAGAACTTTTCTCCGATATTATGTCATCTCCGATA
AGAACAGATGTAATTCTAGCACCAGTTGCTACCTTTAACACATATTGATAATGGAGGAAT
AGTATCAGATAACAACAAACCTGATCTGGAGAAAGGGGAAAAGATTTGTCTCCAATGGT
AAATGTTATATGTGGCAGGGCAAAGACATCACAGTTGATAAATGATTTTCCCCCGGGAT
TCGGAAGCTTCTCACACAGCTTCAGCACAAATTACATGTATTAGTAGTAAGTAACTAATG
AGAACTCGAAAAACAAAAAGACACAACTGTGACATGAATACCTGATTGGCATATTGAAA
CGCTTTTTCTTTTGATCTCTCTTTTCTGATCTCTACTTGTATCCAGAACACTATCATCTCA
CAAGAAGAACATAACGACCCATTATTTGTACAGAGTCCAATTCTGTTGCATACGTTCTCC
GGTTGTAACTGCATGCAGCCAAACAAAAGGATGACATCTAAATAAGAGAACACCTAAAA
TACCCGCACACAACAATTAGAAGTTAAAAAGCAGCTACCCCTGCTATCAAGCGTTCCCA
GATCGAATCCCCATAACTCGAGACAACTTTTTTGCATTCCAAACTAATAATTCCTTCCGC
TCCAATGGCATGATTTATTTGAGTTAAAATAGTCTGAAATGGAGATGGCTGAGAAGAAAT
TGATCTTGCAAAAAAGAATTAAAATCAACAATGGTTTAAATACAGACAGTTGGACCAGCG
ATAAATGATGTCCCTGTATCCACAATAGCTGGACATCCATCCTTACAAAGGCCTGAAAG
GGAAAGAGCAGAATTACACTAGAAATGCATTGTTTTTATATAGTAAATCACTTATGTATAT
GAAGATATTACCTGTTGAATTGCTTCCTATAAAAAGATCCCCTATCTCAATCTGGAATTTT
TGAAAAAAAACTCAGTTTTTTCAGGTTACCAAGTAAACAATACAAATAAAGTTCCATTAAA
CGGAGGCGCAGGTTACCTCCCAATAACCATTTTGAGCGACTGGTACGTATGTATGCTG
ACCCCTGAAGTGAGTCCAATCCATGCCTCCAAAGATAATTTCACCCGCTATCTTAGACG
TAGGATCTCGATTTAGCCAGAATGAGAAGATTGACTTGGTAACCATATGCTGAAGCAAC
ATGTTATACCTGAAATTAACTCACACAAAAGAATGTGGATTTCAATTTCAATGACACAGG
TAAGAAATGAATGAGAGAACAAGCTCATTAAAACTATGTCAGAAAGCATAAATTACTATG
TCAAAAGTTATTATAATATGAAGAGATAATAATTTACCATACTGGTGTGACATTCCTTGAT
GTCGTGCTCTGATCAAATCCAAGTCCTAGTACTCCATCAAATCGTGCACGCAACAATGT
CAAGTATCCCTCCCGTGTTACCTCAGTGAAAACCTGTTTAATAAATTTTATTCAACATGT
AACTTGAAAACATATATATCTACAATTTCAGCTGCAAAGACCGGCACCTGCTGCTTTAAG
ACAGCACCTCCAACTTTCACATTGTCTTGGCTGAAGAATCCATGAACTGAACCAGTGCC
AAAAGGGATTTTGCTAGACTTTCCTATCATAAAAGCCCATGTATAGAAGTGATAAGTATT
TCGATTAAGCTATTCTACGCTTAAATATCAACAATGCTCTAACCAAAATAAAGGTTTGGA
GGTCCATTGGGTAACTACCAATTTTTGTATACGTATTTGATAGTCTTGATTTGTACCTGG
AACGAAGATAACATGCAATCTGCATTGGATAAATCCATTCAAAAGTTAGTTAGTTTCATG
TAGTGAAAATTGTTAATCCACAACTTGACAAAGACTAACCGAGAAGAAACATCTGGAAG
AAGGGACCCAAAGATTGGAACTTCCAGTATCAAACACAACAATGAAGCGTTGGGGCGG
TGAACCAATACCAATCTCCGCGAAGTACTGAACATCATGATAATTTTTGAGGTAAACTAT
CTGGTCATTCGGAGCAGCCAAATTTCTATTGCGACCCCTGAGATCTTTAGCGTAGATTC
TTGCATCGCTTATGCTAGAAAGGTCCAACGATTGCCTTTTTAGCTCAATCCTAACCATAT
CATCAGCATATACGTTGATGCAGGTTATATACCATATTACAAGTGATGCAAGAAGGATTT
TGATCTCCAT
SEQ 61
ATGGCGTCAATTTTCGCTCTTTCATTATTTTTCATTATTATCTCTTTCTGCATCACTTCGA
TCACCATTCCCGTTCAATCCGACGGTCACGAAACTTTCATCATTCACGTTTCTAAATCCG
ATAAGCCCCGTGTGTTCGCCACCCACCACCATTGGTACTCCTCCATCATCCGATCCGTT
TCTCAACACCCTTCTAAAATCCTCTACACCTACTCACGCGCTGCCGTGGGCTTCTCCGC
CCGCCTCACCGCCGCGCAGGCCGATCAGCTCCGCCGTATTCCCGGCGTAATCTCCGT
CCTTCCCGACGAAGTACGCCACCTCCACACCACCCATACCCCTACCTTCTTAGGCCTTG
CTGACTCCTTCGGCCTTTGGCCCAACTCCGATTACGCCGATGACGTCATCATCGGAGTT
CTGGACACAGGTATATGGCCGGAAAGACCGAGTTTTTCCGATGAGGGTCTCTCTCCTG
TTCCTTCAAGTTGGAAAGGGAAGTGCGCTACTGGACCGGATTTTCCTGAAACCTCATGT
AATAAAAAAATCATAGGTGCCCAAATGTTTTACAAAGGCTATGAAGCTTCACATGGCCCA
ATGGATGAATCAAAAGAATCGAAATCGCCAAGAGATACTGAAGGACATGGAACACACAC
AGCATCAACTGCAGCTGGTTCTGTAGTGGCAAATGCTAGCTTTTATCAATATGCCAAAG
GTGAAGCTAGAGGTATGGCTATAAAAGCAAGAATAGCTGCTTACAAGATTTGCTGGAAA
AATGGTTGTTTTAATTCTGATATATTGGCTGCCATGGATCAAGCTGTTAACGATGGTGTG
CATGTGATTTCACTTTCCGTTGGGGCTAACGGTTATGCTCCACATTATCTCCTTGATTCT
ATTGCAATTGGAGCTTTTGGTGCATCTGAACATGGCGTCCTCGTCTCATGTTCAGCTGG
AAATTCTGGTCCCGGCGCTTATACGGCAGTGAACATTGCCCCCTGGATTCTCACCGTTG
GTGCTTCAACTATAGATCGTGAGTTCCCTGCAGATGTTATTCTAGGAGATAATAGAATAT
TTGGTGGCGTATCATTGTACTCCGGCGATCCATTGACCGATGCCAAATTGCCGGTGGTT
TATTCCGGCGACTGTGGTAGCAAATACTGTTATCCAGGAAAGCTAGACCATAAAAAAGT
CGCTGGAAAAATTGTTTTGTGCGATAGGGGAGGCAACGCTAGGGTTGAAAAAGGGAGT
GCAGTGAAGCAGGCAGGCGGAGTAGGGATGATACTCCTTAATTTGGCCGACTCCGGTG
AAGAGCTCGTCGCCGATTCACATCTTCTCCCCGCGACGATGGTAGGTCAAAAAGCAGG
AGACAAAATAAGACACTACGTAAAGTCTGATCCTTCACCGACGGCGACGATCGTGTTCA
GAGGAACCGTGATCGGAAAATCACCGGCGGCGCCACGTGTAGCGGCGTTCTCGAGCA
GGGGACCGAATCATTTGACGCCGGAGATTCTCAAACCGGATGTTATTGCACCTGGAGT
TAACATTTTGGCCGGTTGGACCGGATCTGTTGGACCGACCGATTTGGATATTGACACGA
GAAGAGTGGAATTTAATATTATTTCTGGAACTTCCATGTCGTGCCCTCACGCTAGTGGA
TTGGCTGCGTTACTTAAAAGGGCCCACCCTAAATGGACCCCAGCAGCGGTAAAGTCAG
CACTCATGACAACAGCTTACAATTTGGACAATTCTGGTAAAGTATTTACAGATCTTGCCA
CTGGCCAAGAATCTACTCCTTTCGTTCATGGATCAGGTCATGTAGACCCGAACCGAGCA
TTGGATCCGGGTTTGGTTTACGATATCGAAACTAGCGATTACGTGAATTTCCTATGCTC
CATTGGCTATGACGGCGACGATGTCGCCGTGTTCGTGAGAGATTCTTCTCGAGTGAATT
GCAGTGAACAGAATTTGGCTACTCCAGGAGACCTGAATTACCCGTCGTTCTCTGTTGTT
TTTACCGGTGAGAGTAACGGTGTGGTTAAATACAAGCGGGTGATGAAAAATGTAGGGA
AAAATACAGATGCTGTTTATGAAGTGAAGGTGAACGCGCCGTCGTCTGTGGAGGTGAG
TGTGTCGCCGGCGAAGCTTGTATTCAGTGAGGAAAAGAAAAGCTTGTCGTATGAGATTA
GCTTTAAGAGTAAAAGCAGTGGTGATTTGGAGATGGTGAAGGGGATTGAATCTGCATTT
GGGTCGATTGAGTGGAGTGATGGAATTCACAATGTGAGAAGCCCAATTGCAGTGCGTT
GGCGTCACTATTCTGCGGCATCCATT
SEQ 62
TCACATAGGAGCAAGATGACCTTGTTTGGACAATTTATCTTGCATCCACCTGTGAAGCA
TTTCCAGTGCTGCCTTAGGTTGATCCATTGGAACCATGTGACCAGCATCATGGACCTTT
AAGAAAGTTAAAGGCCCATAGTTCTTTTGAACACCTTTCTCTACACCATCTACTGCAAAA
GAAACTTGTGTGGCTTTTCCAAAGGCTTTTTGCCCTGACCATTTCATTGCATGCACCCAT
CTCGAGTTTCCTGCCCATTATAGCAAGAAATTGAGTTTAGTTGTCAATTACTAGGTTGTT
TTCATCTTTCAGTTTATTGTAACAAAATTATGTTTATATATCACATATAAAATAAAAATAGT
TACCGGAAATATATACTAAATCCGGTCAAAGAGAGATCATATCCATGTAACACAATGTAT
AGGAAGGCCCATTTTTTTTTTGGTTGGTCGGGTAATGTTTTGTTTTGACAATAAGTAGTG
TCACATGGATATTCTGAATGTAAGGTCAGTTGCCGATATGACTATATTATTACATGTAAA
TGTTATACATTTGGCAGCCTACTTGCACTTTCTTAGAACCGGCTTTAACATTTTTTGACTT
TGTATTTTAATTTTCTGTGATACATAGGTATAATTAAGTTATTTTGCTTTACAGAAACATG
CTTAATTTTGTCCATATATGAAATTAGATGTTGGGTCAGAGATGAATGAAGCTTACCAAG
CCAATTGCAGATAAGGTCATATTCCCCAGCATACACAAGTAGCTTGATACCATCCTCAA
GGAGTGAAGGAATTCCCTCTTCAAGATTCCTCATCCAGTCCAACTGCATTGCCTGGTAA
ACCTCAGAGCTACATGAAACAAACTCAATATCCCCAACACCAAGTGCCTTTTTAACTTGT
TGGTCATTGAGGAAAGTTTCCATTTTTGAGAAGTCATAGCAGAGATCACCCTCACATCT
CTTCCGCACGTCATAGTACTGCAACTCGGAAATTACATGACTTTAACTTCTCTACACTAA
CTAACAATGTAAAGAAATTTTTATTGTTACTTAAAAGATAACTACAGATAATAAGTGAGAT
CAGTAATTTGGAAAATGAGACTGCAAGTAGCGTGTTGTACATCATTAGCTCAAAGAAAAT
GAGATTGCGCTTTCTTACATTTTTGTCACCAGCAATGTCCATAATCTTGTTGAAGATGCT
TGTACAAACAAGATATGCAGCCATGCAAGCAGTTCCGCCATCTTTTCCTAATATTATTTG
CATAGAAATAAAGCTAATTAATGTCAAGATTATATTAGCTGCTGCTATATGAAGGAGAAA
GAACTTACAGGATAAACAAAAAATTAAGAATTACCACAAAGCTTAATTGCCAACTGACAT
TTTGGATATGATTTCTCTATGGCATTGTAATCAGATTTTTTTATCAATTTCATATCCAGAG
CATAGTCAGTGTAGGCTTTGTATTGAATTTCTGGATCAGTGAGTCCATTACCAATAGCAA
ATCCCTATACAAATTAAATACACTTGGTTAAGTTATCGGCATGATGACAAATTTAAATTAA
ACCTACCTAAAAGTTTAACTGAAAAAAAAAAAGAATGGTGGAGGAGCTAATGAGTTAGA
AATACCTTGAGATTTACGTAGATGCCTTCTTTATTTTTGTTTCCTTGGTGGACCCGAGAA
GCAAATGCAGGAATGTAATGCCCAGCATATGATTCTCCAGTAATATAGAAATCATTCTTT
GCATACTGAGGGTGTGCCTTGAAGAAGGCCTATCATCAAAAGAATTTGAATTAAATTTTA
TTAATTATATCAGTTAAACTTTAGAGACTTATCACGAGCTAAAAAAAGAAGAATGAAAGA
ATAAGATCAACCTGCAAGAAGTCATAGAGATCATTGCTTACGCCCCTTTCATCGTGACG
AATATCATCATCGTTTGAACTATAACTGAAACCAGTTCCAGTTGGCTGATCGACGTATAT
AAGGTTTGAGACCTGTCAAATTGCAATTTATCTTATGTTATCATCATTCTTCAACTAACAA
ATGAAAGTTGCATGTTTGATTATAGGATTTAACCAATGTAAACGACTTTTACAGTATTGTT
ATATATATATATATATATATATATATATTAACATGTTGTATTAGTCCGGTTACTAATCCCAC
TTAAATAAAGAGAAGCGTAGTAGTCATTGCTGTCAATAAGCGATGAACTACTTTTAAACT
TTTGAATTCTACAAGTCACAACTAATGAACAAGTGATAAAGAAAGGAAATGCTAGTAGGT
AAAAAGGTACTTTGCATGATGGAGCAAGGTTGAGTAACAAATAAAAACATGGAGGGAAT
TCTTTTAGACTTTTACCATATTCAAAAGATCTAACCGACGTTTCTTGAAAAATTAATTGGG
TAAAATAAAAAAAATAAAAAATAAAAAGCAAAAGGAAGAAGACAAGAACCTTGTCCCAGC
CGAAATCATTCCAGACAAGAGACATATTATCTGCAATTTTGAATGGTCCGTTTTCGTAAA
ACACAGCCAATTCACTGCTACATCCTGGCCCTCCTGTTAGCCATATAACTACTGGATCA
TTCTTCCTGCTTCTCGATTCAAAGAAAAAGTAAAACATCCTGCGAAAAACATATTAAAAA
AACACACAGATAATTTAGCATTAACTAATAATACCCATAAATGAAGCAAAAAGAGCATTT
AATCCAATTCAAACCTTGCATCTTTAGTATGTGGAAGACGATAATAACCAGCGTGATGAC
CCAAGTCTTGAACTGTAGACCCAGAATTACCAACATAAGATAAATTCAATTTCCTCTCAA
AAAGCCTCTGTTCAGAATCCCCTGTTGCTGCAGCCTTGTTAATATCATGTTTAGGGAATA
AATTAAGCTGTCTGATTAGCTTTTCTGCCATTGTTAATGGGAATTTAGGAGTAGAAGATA
GGAAAAACTCATCGTCATTAGAATTTAAAGTTGATGAGAAAGATAAGGAAATAGAAGCAA
GAAGCAGAGTAAGAAAGAGGGATGAAGGCAT
SEQ 63
ATGTTAGTTATCAGTGATTGTTATATAAATTCTTGCAAAGCTTTCAACTTTGTGATCAATT
TGCCCGTCATGGGACACTCTCACTCTCATTCTTCTCATTCTCACTCTCACTTTCACTCAT
CTAAATCTTCCGATGATCAAAATATGGATATGGGGGAATCGATCACCACCCAAACAGAC
GTTTCTTTCATGCTCGCTAAGCATGTTTTCTCCAAAGAAGTTAAGGGCGATTCCAACCTG
GTGTTTTCTCCTCTCTCAATTCAAATAGTACTTGGCCTGATTGCGGCCGGTTCTAAGGG
GCCAACTAAGGATCAGCTGCTCTGCTTCCTCAAGTCCAAATCCATTGATGAACTCAACT
CTCTTTATTCTCATTTTGTCAGCGTCGTCTTTGTTGATGGCAGCCCCAATGGAGGTCCT
CGTTTGTCTGTTGTTAATGGTGTTTGGATCGACCAAACACTGCCTTTTAAGCCTTCTTAC
AAAAAGGTTGTGGATAAAGTTTACAAAGCAGCTTCCAATTCTGTTGATTTTCAGTGCAAG
GTTAGGCCTTTATTCGTTTGTTTCATTCAAATCTTGTTTCTTTTGTGCTGGGGTTTAATAT
TCTTTGTTCATGCTGACTGCTGAAAATTGGTTCTTTAACTAGTATAATTGACCCTGCATAT
TACTCTCATCATAAGCCCTCCAAATATATCATATAAAATGGATATACATATAGTAAACTGC
AACTAATTAACTTGGGATTGAGGTATAAATGATTGATTGACCAATCTGACTTTAAAATAAT
GAAAAGTGTTAAACAATTAGGACAGAAGCTATATTGCTTAGCCTCAAGTAGTAACAAAAC
TAAATAATGTCAACGGTTGATACTCGTTTCACAGAATTGAGGCAGTTTAAAGAGTAAAAA
GTATTGGTTGTTAATTTGAAAAGTAAGATGAAAGAGTCACAATTCATCTTCATCAATGCT
TATTGTTTAGCAGGTTAGTTGACTAGTTCGACATTTTACTGAGTGGTAATAAGCTTCTTTT
TTGTAGGTAGCTAAAGAAGCCTAAGTAGTTCTAAGCTCAACTGGATATGTGGCCGTGCT
TAATTTTGTAAAACTTCAGTTTTTGGCCTAAATCTACACCCAATCAGTGCTTAAAATATAC
CATGTAAAGCATCCAAATTCTCACTTACCCCTTGCAAGTACTGTAATCAATCTTCTTACT
GCAAACTCCCTTTGTTGGCTAAAGCATATACGTGTTAATTCTGTCGTATACTCTGTTTGT
CTTGCTAATTGAATAAGGCTGCTGAGGTTGCCAATCAAGTCAATCAGTGGGCTAAAATG
AAGACAAATAATCTCATTAAAGAGATTCTTCCTCATGGAACAGTAAACAATATGACAAGG
CTCATCTTTGCAAATGCATTATATTTTAAAGGAGTATGGAATGACAAGTTCAATGCTTCA
GAAACAAAAGACCATAAATTCCATCTCCTCAGTGGAGGGTCTATTAAAGCGCCGTTCAT
GACTAGCAAGAACAAGCAATATGCAGTAGCCTTTGATGGCTTCAAAGTGTTGGGACTTC
ATTACAAGCAAGGCAAAGATATGCGTCGTTTCTGCATGTATTTAATTTTGCCAGATGCTC
GTGATGAATTACCAGCTCTATTGGACAAGATTAGTTCAGAACCTGGTTTTATAGATCATC
ACATTCCGTTTGAAAAAGCTAAAATGCGCAAGTTTCTTATCCCTAAATTCAAAACAACTTT
TGGTTTTGAAGCTTCCAAGGTTCTAAAGGGACTTGGCCTCACATTGCCTTTCTCCAGTG
GTGGCCTCACTGAGATGGTGGATTCCCCGTTAGCTGGGAGGTTGTTTGTTTCGCAGAT
TTTTCACAAGTCCTTCATTGAGGTAAATGAGGAAGGAACAGAAGCTGCAGCTGTTACAG
CTAGTGTAATAATGACCAAGTCCTTGATAATTGAGAAGGAAATGGAGTTTGTTGCTGAC
CATCCATTTCTATTCCTTATAAGAGACGAATCTACCGGTGCTGTGTTTTTCATAGGGAGC
GTGCTGAATCCTCTAGCTGGT
SEQ 64
TTAGCTTGAGCAAGCTGACTGAAGTTCAACTGCATTTTCATCATCAGTAAGGTCACTAGA
CATGGCATGAGGTATTCTATGGCGTTTCAATATACGCGATGTGGCTATTCTTGCCGATT
CATAGTTCAAAACAATCACCTTCTCATCATCCAAATCAAATCTTACATTCTTTTGGTTACC
ATCTTCCACAAGCTGACGTAAATGTTTCAAATTCAGAACTTCTACGCCATTAACCTTCTT
CACCTGTACAAAACGGTTCAAAATTTCCCCGAAAACAAAGAGGAAAAATAATTATAAGG
CGCCCTTATGTTGTCTTTTAAGGGAGAATGAAGTAATAGAAGCAACAAGTGTTTTACCTG
CAACTCGGCAAGGCGCTCATAACCAGCATTAATATCATCCATCAACACCTAATTAATTGC
AAACGGTCATATTAGCAGCATATAGCTCATTGATCTGCGAGTACAATCCTAAAGGAAAA
ACAGACCTCCGTCTCTATGTATAGGTTAGGAATCATGTTGCGAAGCAAAAGTTAAGGCA
CAAAAAATTGAAGTAAACAAATACAAAGTTTATTATTTATGAAGTTAGCCAAATGACATAG
ATTGTCAAGTAAAATAAGACATGCCTTCCTCCCATGTCAGAAATCTTACTGGAAACATTT
ACAAAAGGTTATCTAGCAGCAAATATCTTAATACGTTAACAATGTCTGCCCATTTGGATA
GACCCGTCCACCATCAGTTTTGTGTGTCTCAGTATGTATTTAGCATGTGAAATTATGGTG
GAACTTCATGGCGTCTTTATGCTTTTTTGTTTTTCTATTTTTATAAGAGATCAAATTATTTG
AGTTTTCTATTTGACAAAAGGATAAGAAACTCTAGATACCTGAGAAAGGATGATGAATTG
TTCACCAGGTTTCTTAGGTAGTTCCCGAAGGGCTCGTTCACACAACCGACGGGGTGAG
GCATTATACCAGTCTTCTCCATACTCGTGAAGGAATGGTTGAGTTAATGGAATAAAGAC
GAGACCAGCAAATATGAAATAACTCGGAAGCTTGTCAAATTGATGAACTGGAACAAGTG
GCTGCAACTGCATAATGTTAACTAGTTGTTAGATACAGTAGTCAGTTACACAGCATCAAA
GAAACCTTTAGATTACCAATCATACAAGTTGATAAAGTGTTAAATCTAAGGCTTAGCAAA
AAGTGCAGTCACCTTCCCAACACCTTACTCCTATGCATCAGATTCCCAAGAGCGACAAA
GCAAAAAATAACCTTGGTCCACTCGCACACCAAAATACTTCTAACAAAACAAAAATTTAC
CTTGCTCCAATACCGCACCAAAATACTTCTAACTACATAAATTATGTGACACCCCCAAAT
ACTTCAAGGCTTCTTTCATCTTTTCTATTTTTCTATTTTTGTAAAAGATCAGATTGTTTAAG
TTTTCCATTTAACAAAAGGATACTTGATGAGAGCAACTATAGATACCTGAAAGAGGATGA
TGCATTGTTCAACCTTCATATTATAACTTGTGCAAATGATGAATTTACTTCTACCGGAGC
GATAATGTCAATAAGTTATTTTACCAGAGTAATTCTAATTGAACAATGTAGATGCAGTGA
TTTCGATCTATTCGTCTGATTACATGCACCCAGGATATGAGCAGAAGTTTGAAAAATCAC
TGGGAGATACATTCGAAACAACAATTAATTATGAAGGGTTAATAGAAGGGTAATTATGAA
GGGTAAATAAAAGTGACTTACAGGATGAAGCGTGATTTTGAAGTCATGCACTTTGCCAT
TTCTCAAGACTTTAAGTTCAGCAGTTTCATTAGGTTTCTTCATAGATACCAGATGGTCAA
ATGTGATCCTCTCTCTGTTTCGGAAAGGAACTGCAGATCATAAGCAATCTCAAAACTTTA
GTCCAGGGAAATAAGGTTGCTAATTTTGATATGCATTTTAGTCAAAATGCAGAAGGGCA
AACTTTTCTAACAGAAAATAAGTTATTCTAGCCTTACAATTTTCATATCCTGCACACCCAC
TTATCTGGTTTCTGGTATAATTATCAGCTATTCACATGGCAAGAGAAGAAACTCAGAATT
AAAAACGACTAGACTCTAGGCTTTTCCATCTCTCAAAAGGAGGTCATTAATTTGTTACTC
ATAGTTGCTCGTTGAACATGAATACTTTTTAGTTGGTGCTGGCCTGCCTAAAAGAGCOT
CTACAGCAAGAACCACATCCATGTTTCATCCAAATCCGTCATTTTACGTCACGAAACATT
TAGAGAAAGAAAAAGGCATGTGCCATAAAATGTAAGAAAAAGCTGTGAAGAAGAATGTT
GTACTAGTTTAACTGTCGTACATAAGAATTACAAGAAATAGAGAGAAGCAAGGCAATAA
GAGAAAGCCTTACCTGTTCCATCATTTGCTATGGGTACGCCATCAAATGAGAGGATTAT
GTCGTCTTTCTTTAATACTCTAGAAGCATCAGAAAGTGGGTTGATTCGGCTAACAAGCA
CACCTGTCAATTTGGACTGCATTTGGAAGTACTCTCGAATTTGTGCATTTTCAGTAGGTT
GGCATGACAAGCCCAGAGAGCAAAACCCAATGTATTCACCCCGTTCTTCTACTCCAGCT
ATAAAATGCTTTATCACAGGAACAGGAATAATGTAGCTGCAAAATCCAAATAGAACTGAA
ACTTTTAAGGCCAACTATGCACACTGTAAATTTCCTTTCCAATTACAACAGTTTTTCTCCA
AGGTAGATTGTTTAATCAAGGGTATCAGTTTAGATTTGATTGTTTGCAGCACTGAGGAAG
AGTCGAAATAGAATGAACTTGAATTCGAGACCGCTATTTGAAATCATAGTGAAATACTGG
AATTTTTATCTCATGTCTAAGAGCTACTAAATGTTCCCACAAGCTAAGCAAATGTTGATTA
AAACTAGTAAATGTCATCAACCAAATCTCCTTATCAACTGCATGTCATCACAACTAAAAG
CTTTCAGGCATTCCCACATATGCCATCCTTTGTAACCCCTCTGAGATGAAAAGAATAATA
TTATGAAGCTAGAGCCAAAGGGCTACAACTCAAGCTTCAAATTTGTGAATGCATGAACA
AGGACTGCGTGAAGGGAAAAATCTGAATATTATGACGAAGAAAAATGGAAGAGAAGATT
TGCAGGAGAATACATGTGTGAAGGGAAGAATAACATGCAGTCAGATTCAGGTAAAGGA
GAGAAAAATCTGAATTTTGTGATGATGCAAGTGGATATTAGAGTATATACCCCATCAATA
TTTAACTAAATAATATATGGTAGACCCAGCAATAAATGATGCAATGGAACTAAATCTGTA
TAGTAGTTCTATCCCTCCGGGGTAGGGGTAAGGTCTGCGTACACTCTACCCTCCCCAG
ACCCCACTTGTGGGATCCTACTGGGTTGTTGTTGTTGTTGTAGTTACAGAGACACAAAG
TACCAAAATAAAATTCTAATTTACCCAATATTCTCTGCACCAGAGAGGTTTTGGAAAGCA
ACTCCAGCAACTTTGTCACCCATAATTGCTGGTCCTCCACTATTCCCTGGATTTATAGCC
GCATCAATTTGTATTGCCAATAGTTGACTAGCGCCGTGTACATATTGCGTAGGTTCTAC
CCTTGAGACAACACCTTTTGTCACGGATATATTATCTCCCCCTAGAAAAAAGCAAAAATT
ATTAGAGAACTCCTCAGGTGAAGGTATTTGTGGCTTACAATTAAGTAAAGAAAAAAAAAA
AGAGAACATAGTATAGTGAAGAAAACAAAAATATAACTAGACGTCAACAAAAGATTAAGA
AGGATCTGCACTATTGAAGACAAGAATCTAGTATATGCAAGCTACAAATATCCAGCCTT
GCACCTAGTTGACACCAGAGAGAAACAAAATACATCATGAAAGTTTCCTTTTCACTCTTC
TGGATCTTATTTGTTCGCTGCTCGTATGAGCCCTCGAAAAGGGTACACCGAATCCGAGA
AAATAGTGCACTCTCTCGCGGAGTATAGCTCACATCCAAACATCTGATTAGGGAATGGG
GCAATGCCCATGAAGCTCTGGCGGAAAGGGAAGGCATGCCAGGCCGTATGCCTATGG
GTGCACAATTCTTCGAAAAAGCGCATGCTACCTCGGAGACCTGGGACCTTGGCTTAGT
AATGAATGAAGGGAAGCTCTTCGAGCTTTCTCCGCCAGCGGCTTATGTAGTGGTCGGC
CTTATAAAGCTCGCTAAGCCTCGCTTCCCTCTCCCCTTCACTTATTAATTAAGTGGAAAA
TAGTCGTCGGCATTCTATAAGCGACTTGACCGAGTCTACGAAGCTTTGCTTTTCTTGTA
GTCGGCCCGTAATGCCTCCCTTCATTTGCTTGCCTCCTTTCAGCTCAGAATGCCTAATG
CCTATTATTTAGTGCTAGAAGCTAACCGCCATAAGCTCACCCTTCGGGTCTCGCTTCCA
GCGCAGGAGGCCAAGCATTCTGCCAGACGTCCCGGCCTGGGAGCCCCGTTCGCCTTT
GGTNGCTTATTAATTAAGTGAAAAATAGTCGTCGGCATTCTATAAGCGACTTGAGCAGA
GGAGACAAGAAAAGGCTCAGTGGTAACTGTTATGAATGTGGAGGAGTGGGGAATTTTT
GTCGTTACTGTTACAATGTTCAGACGGACGAATGCTGCTAGGGGAGTGCAGAATAGAC
CAGCTGAACGTAGTCGGAGAAGCTCTAAAGGTAAGTTCAAGTCGGAAACATTGTGTTTC
CACAAGAAAAGAAGCACATATTTTTTATAGGATTTGATTTGATAAATGGAAGGAAATTGT
CAATTGAATTGGCAGAAAACTATGGTAAAGGGGAGCCCAACGTCCTCAGCAGAGAGGA
ATGGCAGATGCATTCCCCCCNAATGACATTAGCCTAATTTATTTGAACTATAGACCAAAA
AGAGCCCCATTGGAGTGAAATATATATAGTACTCATACTGCTGTTCCCAATTGATTTGGA
TTGAGGTGTAGCTGATTGGTTGATTTCGTGAGAAAACATGAATAAAAGGAGCTCACTTG
TGAATTGTGATTCATCTGCCGTTGTATTTTAAGACACGAAAAGAAGAATGTGAATTTCAT
ATTAACTCGACACCGTATCAACAACTCAGTTATTTTTATTTTTCTGAAAATTATATCAATA
ACTCAGTTATTTCGAATAGGTATAGCATCCCATTGCTAAACATGAATGTTGTATATCACA
CAAACAATAGGGGGGAAAGGGAGGTTCAGAGTTCGATTCAAGTGTATGGGGGGTTGG
GTGTTTACATTACATCTTGAATCAGTTACAAGAAAAATAATTATCTTGAGGATGACCGCT
GATTAAAAAAAAAATTACCTTGAGGATAACCAACAACAGCCACAGCTTCTTGGAGAAAT
GGAACATCACCAAGCTCCAAAGAGTTCATGCCCTCCCAGAATTCTTCACTTTCTACCAC
CAGAATAGCCAAGTCACATTCATGACCAACAGCTTGCACTGTTGCTCTATACTTGGTAG
GAGAACCATGCTTTCTTACAAGTACAAACGTATGATCAGCCACAACATGAGCATTTGTTA
GGATCCTCTTTCCCCGAATAACAAAACCTATAACATTAAGAATGCAAAATCCGAAAGTAA
GCTTTATGTTCTCTTAAATTATTAGTAGGTCAGATACTTGATAAGTTGATATGAGCTCTGT
ATTCTCTTCTTTTAAGAAAAAGAAATTATTACACATAGAGGGTGGGGAAGGGGAAATGG
GGGAGGGGATTACAAGTGGGGAATCGAAACCCAAACTTGTAACAAAAGCAGATAAGAG
AATTAACCTTCCAAAATCGAGTCCCCATAACAAATCAATCAACAATCCTCAATCCTAAAC
TAATTGTAGTTACAACATCAATAATTTCATGCTTTAATCCTAAACTAGTTGGCGTTGGAGT
TGGGACAACAAATCTCTAATACTTGCAGCCCTTGGGACAACAACAAACTATTTATCTCAA
TCAGTGGCGGAGTCACCTTATACCAAGGGGTGTCAATTTGACACCTGACACCCCTTCAC
GGGAAAAAAATATACTACATAGGTAGGTAAAAAAAATTATATATATGTTGACTCCCCTTA
ATTTTTTCGTCTATTTACTTATATATATTTTGACACCCCAATGAAAAGCATGCCTCCGCCA
CTGATCTCAATGAACAACAACTTCATAAAAAGTAGCCTTTTGACAAGGCTTCCTTAGTAA
ATGAAGTGCCAATGTAAGATTTTCACAATAACCAAATGGCTAGTAAAAAAACGGAAGCAT
TACACTGATAGAGAATAACATATTTAGAAAGTAAATGAAAGAGAATAAAAATACCAGAGC
CCGTAGTTTCACGCTGGGACTTGTTCTGCCATGGAAGGAAGTAATTAGGACTACTGGAA
ACAGTGAATATTTTAACTACAGAATCCAATGCTAGCTCTATTGCTAAATAAGCATCCACC
ATTCCACTACTTAATCGCTGCTCCACCGCCGCCACCGGTTCTACTTCCGATGCATTGGA
TTGAAGACTATCATTTTCCTCAGCTCTCTCGACATGAGGTGTCGTAGAAGTTGTTGAGC
TATTGCTGTTATTCAAGGTGGAAAAAAATGAGGCGGAAGCAGAAGTATTACCAACAGTG
CTGCTATAATTGCAGCGCCGAACAAATCGATGAAGCTCTTGACGTCGGTGATGTACCG
GAGCTACATCTCCGGCGATAATAGGGGATTGAAAGTGGAGATTTCTGTTTAAGAGCTTT
CGTGCTGTACGGAGACTTGGACCTATTCGTAACAT
SEQ 65
CTAGCTAACTTGCTTTTCACTAGCCTTGTAATACAGCATTTTCTGCACATAGAACATCAT
GTATCCTTGCGCAGCTCTCACAATGTTTTCGCTCACTTGAGTGATCCAAGCATCATCAC
ATTTGTACCATTGATTACTTAACCTAAGATATGTTACGTAATGACCAGCATCAAGTTTAC
CGGTATGGGTGATGACAGCAAACAGCTCAAACTCTGAGGACGATTCACAGGACGCATC
TTGCTCGTCCCCATCAAAGGAGAAGATTCTATTTCCAAATCGACTCCTCAAGATAGATG
AAGAAAGGTAAGGCGACATGTCCAAGGAAAAAGGAAACTGTAGGTAGTGATCAACCTT
CCTTGACATTTTCTTAATCACAGAATGCTCAAACCTTTTGATATGGAAGCAAGAAACCAA
AGGCAATTTTCTTATGGACATCTGTTTAAGAGATTCCTGTCTCACTTGACAATGTTGGCA
GAAGAACTTCTGATCAGAACCCAATTTCTCAGGTCTTGTGAAATGATCTAAACATCCCAT
CAACGAAGAAATTCGACCGTTTTGGCTAAACTTTCCAGATTCTGCTTCCTTCTTGTGAGT
ATTATGAGACTTCTTTGATGTCATCTTTGAGGAACTCCCCTGGCTCAGTTCCAAGTCCAA
GGAGATGTCTATACATGGATCATATGTAGTAGATGTGAAGCCACAAGCTGTACACATGA
CATCAGACCGCAAGATTCCAGAAAATACTCTATGAGCAATGCAACAGTCTCCACTACCT
GTGCCAAAGAAAAAGATTTGATAGAATGAGATCACAGCTGAAAAAACACAATGTGTACT
CCTAATAAGTTACACAGAGTAACATACTTAATATGCACAGCTTAACGTGCTCCTCGACAC
ACTTCATAACAAGTAAAAGTCCAGTTATGCCATAAAGTTCTATCAGCTATTGCATTACTA
GACAAAACAAAAATCGTCCTATCAGGAATGGCAACCAACAGAATGAGTAGCTAAAAGCA
ACGGAGTACTATTGAAATAAAAGTAAAAAACTCAGTAAGAAATGTATCCGCAAGACACAT
TTATTGCCTCAAAAGCTCTATCTATTCCATTTACACAAAACCATTCAGAATCATAGATAAT
GTGTATTCATTATTTAAATGCAATACCCAGATGTTAACTAAATTTTGCAAACTCAGGGCA
GATAGCCCTGCACCAATCCTCTAATTAAGAGGAATGAGAATAGGTGTGAACTCTCACAA
TCAAAGTACGTGTCACTTAAGTGAGAACCAAATCAGCATATTTACAATGGTAGAAATGAA
TTGTTGCTAAGGAGTTACCCCTCTAATGATTGCTCTGCTAAAGAAATGCGAGGTACCGA
GGAGCTAGACTCACAAGAATAATAAGGCACATAAGGGCTTATAGAAAGGAGGAAGCAA
AAGGCTGTCAACCTAGTAAAGATTTCAAGCTTTCTTGAAGGTTGCGATCAGCTCACTCG
AGAGTAATACCCTAAAACATGGTAAAATTGCGAGTTAATACGAGAACTATTGTACCAGAA
GAAAACTCCTATGCTGAAATCAATAAGACTAACCAAACTGAGACTTACTGGGGAGAGAG
TAGGAGGAAATCTTTTTCCTTTTGAGAAACATCTCTAAGCCTGACAGCGAATATCAACTT
GTAAATCGCCTATGGCAAAGAAAAGACCTAAACCATAACCTGCATTCAAATATTACTATT
TTTTCTCAGTGACAATGGAAGTTGGGATTGCCATGAGAGATGAGATGCTAGAACAAAGA
TAAGCCCATCAAGCAGGCCCTGAGTGCCTTTTAGTCAGACGTTACTAGACATCACAAAG
ATGCTTGAACACACTATTCTGCTTCTGACAGAAATTGCTTCTTCCACCCCCTCCCCACCA
ACAAAAGAAATTCAAAAAATTCACCTACTGAAGGACTTGACCTTTGCAAGTACCTGTACA
AGTTTCAGTAATCCACTTGTTTGAGGTTTTTACAATACTAGCCTCCCTTGGCTATGTTAC
ATTTATGTTACTTTAAAGTTGCTGCCATGTGACCTGGAGGTCACGGGTTCGAGCCGTGG
AAACAACCTCTGCAGAAATGCATGGTAAGGCTGCGTCCGATAGACGCCTGTGGTCCAG
CCCTTCCCCGGACCCCGCGCATAGCGGGAGCTTAGTGCACCGGGCTTCCTTTTTTTTT
TATTAAAATATATATAAACAATGTTGTCAATAATTTTCCCAGTACAACAAAAAAAAGAAAT
CTCAATGATTGGTCTAATTCGGAAGAAAAGGGAAAAAGGAAGTATAAGAAACTAATATA
GGCAAGGTGATGGGCGGAGAAACGATGGGCAACTAATAGGTACTCTAATGCAACAAAC
AAATTTACCTGGACTCAACGCCTTTCCCTTATCGTTCTGCATCCTTTCATGAATCCCGTC
AAGCACGGAAATGAAAAACTCATGAGCATCCTGCTGTTCATAACTTGCAAGATTTGATG
CATGCTTCCACCAGCTGTTCCAAAGAAAGGTTTACATCCATCTGAATGAGACACAGCAC
AGACTGCAACTAGATACTCAAAAAGTCGAAATCCACATCTAATAAAACAAATTACAAATG
TATGTATATCACAACCAAGTTACACACCACCAGTGGCGGAGCCAGGATCTCCGCGAAG
GGGGTTCAAGAAAAAAAAAATCGTAGCTAGTGGGAATTGAACCTATGACCTTTCAAAGA
TTTTGAACCCCCTTGACCACTAAGCTACACTTATGGTTGTGTCAAGGGGGTTCAAAACT
TAATATATAGAGGTAAAAAACAGATTTTGCCTTATATATACAGTGTAATTTTTCGGCGAA
GGGGGTTCGGGCGAACCCCCTTTCGCCCCCCTAAATCCGCCCCAGCACACCACTGTCT
AATTTCACCTCTATGAAGGGAAAAGCGTGGTACATACAATCCCAATAATAAAAAACTAAT
CTTGTCCCTACATCATTTTCAAAGAAGTGCACAACCCAAGCTAAATTAAGGAATCTTTTA
CCAATGTATTGTTATCCTTATAAAAAAGAATTATATACAACTATACCTCAATCCCAAGCAA
ATCGGGATCAGCTATATGAACTTCACAACACACACACACACACACACAAAAAAAAAAAA
CGTGCACATTATAACAAAGCCAAACATTATCTCAACAAACCAAGAAAACATGATCAAATG
CAGACCTGTAAAGGAACTTTGCAGGACTAATAGGGGTCCGATCGCCAGAGAAAACAGC
AGAAAACATTGCATCCAAATCACAAGCCAAACACAGCATTGTTGAGTTCTTATTCCCATT
ATCACTACTACTCCTTGTTATAACACTGCTATTCTTTCGCTGGCAAAAATATCTGTTATGC
TTGTCACTCAGAAAGTAATTCCTCAATGGTGGTGTATGAAGCAATGCTTGAAGCACTGA
ATTCATAAAACACGTGTTTCCAAGATTGTTAAGGCCCCTCAAACCCCATTGTACTTCTGG
GGTTGTTGAGTCATTGCCGAGCTGACTCGGCAACGGACTCGAGTTCCCAACGATCAAG
ACTTGCTCTTTCACATCAGGCGTCCACGGTTTGTACTCCACGCGCCTCCTCTTGCGCGT
GCTCTCCGGATGCGGCGGAGGGTCTTGTATTGATCCGATCACGGTGGCCTCCGTCTGC
GCTAGTGCCACGGCGGCGTCGAAGTCGCTATTGTACACCTGGTCCCTACACCCGCAGC
AGAACAGCTCGGCCCGGTCGATGTCCACCGCGATGCAGTGCAGCGAGGGGTCCGCAG
CGTTTCCCGCCGGATGTGACGGCGCGTGCACGCGGCAGAATACCTCGGCGCACGTGA
CGCAGGCGTACAACCGCGGCGGCGCGTGTCCGCACGCACCACATCTCACCAGCTCAT
TCGGCGGCTCGCGGCAGAT
SEQ 66
TCATAACTTACTGTGCACGAGCTTATTTGAAAGACGTTCAACCTTGCCAAGTTGAGTTGC
GCTCTTCAGCATTGCCTCGCTGTCAGCTATAAACTTTGCAAACTTAGAACCCTTTGTATC
ACCATCACTATCTCCTCGAGGAAGCATTGGCAGATGAAGCATAGAGGGACTTTGCTTG
GAAGATAAAGGCGGAGTTAATGCCCACACAGAAGAAAGCTGTTCATCTGGTTTGTCAAG
ATATTCCAATGATAGATTCTGCATGTCTGTNTAACGGTGATAGATCCTGCATGTCTGTCA
GGAAGAACAGAACAGAAATATCAGACGTTGGTATCGTGCCTACCAAGTGTTATTCGGAA
CTGATTTCTTGAGAGTTGCAAAACTTATTAAGAGCTTGCAGATCAAATGTTACTGCTTTT
ATTCTTCATACGGGAAAAGACCACCCATTATCTGAAAATGGAAGTATCAGGAACAGTCG
AATAAAGTACCTTCAACAAACTTGAAGATGGGCTCTAAAGCTGCACATGGAATGCTGAA
GTTCAAATGTGGAATGACCGTCCCTCCACCATGTCTAGCATTACTGCATCAAAAATAAAA
CTACAAGACATGAAGTTTCAACAAGAAAGATATTAATAGATGGAAAAACTATAGAAAGAC
CATGATATGTGAAGATTAACATAAATGAGATGACTAAAAGATCTTCTGTATGAGATCATT
CAAATTGGACACCATTATTTTTCCTGTATGAAAAGCGTATAACCAATATACATTTTTGGTA
AGGACAATTAATATACATTCAAACAGGAATATCTTTCTTCAAGGACTTCTCAAAGTACTC
CAGGACGCAGTGTACCACAATATCATTAGATTGAACTTCAAGAACAAACACATGTAAATA
TACATAAGCTGAAAAAGAAATATCCTCAATTATAAGCATCCCCAGTTGTCATCCAAAAGT
TAATTACCTTGTTACAAGGGCAATCATGTGTCCTTCTGAATTAACAACAGCTCCACCACT
ACCACCAGGGTGTACAGCAGCCGTTGTTTCAAGCATTGCCGGAAAATGTTCTCCTAAAC
TTGATTGGTTGAGCAGAGACCGCTTGGCTTCAACTACCTTAGCTATTGCACCCACACAA
GCAGATGGAAGGAAGTCTATATTATAAGAAAAAGTAAGACAAATTACAAATACAACTAAA
GAAGTCTAATATAGGTATGAAACATATGAAATAAATATACGTAGTATATCATGTTCAAAAT
GAAAGAACTTAACAAAATTATTCACATGAAAAGCAATTTAACCTCCAGAACAACATGATT
TAGTACTATTGGGCGCACAAAGATAGTCAGTTCCAGAAAATTATGTTCAGCAAAGGTTAT
GGAACAGACAAGTTATCTGTATCAACGAAAAAAGATGGAACAGACAAGTTAAGATTGCA
TCAATAAACAATAGTAGCACTTGCAACAACCTAGCTACTATTAAAATATCCTTGAGATAC
AGCCCGACTCGAATAAGTGAGTTACCAGGAATTTCCTATTCAAAAATCCCATTCTTTAAA
GCTGATCATTTGTACTTGCTTTCACAATAGAAAACATCAATTTAATGCTCCAGAAATTTAC
CTTTTTTCGTGATAACTGATAAGTGACTTCAAAACTCTAGATTTGATTCCCCAATTCCACT
TTGTTAGCATAGGTATTAGGTATATATCATTCTTATGGATGAAGATCTGAATTAGTGCCT
ATGGCTTTTATTAGCCCACGAAAGGAAAACGCTTCTTTTTAATTTCGTCTACCTTTCTCC
TTGTTCTGCTAGCCTTGTTTGAGCCCTACAACAACCTCGCTATTCTTAATCTGACGTGCA
ATTTTTTTTAACCAGAAGATCAAAACACTGACTTGGACTACAAATCAAATTCAGTATCAGT
AAACAATGTCTTCACCTAAAAGATTACCCAGTTTTGAGCCCTCCCGACCAATCTGGTTAT
TATTTCTCCATTGGAAGACACCTCAAGTTCCCTTGCGGAGGCGTCGACATCACCTCATA
ACTACTCAATCAGTCATCAAATGATCATCATTTGGTGAAGGAAGAAACATCAAGTATTCC
AGCAGTAACAAGGAGATGAAAATGATATAATACGACCCAATCCTGCAATTGATTATAATG
ACACTTCAACAAATTCTTAACACAAGAGAAGCAAGGTGGAAGAGAGAGAAATTCAAGAT
AAACAAAGTTTTTGTAGAATATTCTAAAATTTCAGATTTACTGTGATGCGTGTGTCAAAAT
AAAAGTAAAGGCAAAAATATTTTATTTAGACAACAAATCTAAAGCAAGATTTACCACATC
GTGGTCCAAATAGCCCATGTCCGAGAATGTATGCTTTTGATCCAGGGGACGGGCACAT
GAAGTCAGCAGTAATGGGACAGAGCTGATCAGGAACTAGCTCAAGTTGTAGTAATGCA
ACATCCAGAGGTCCTCTGGAGACATGAACTACCTTTGCATTTGTCCATACCCAGGGATC
CATAAAATCCAAGCGAACACGAATGATCCTACTGCCTGTCTTTGCCAGGTTAACTCTAA
AGCTACCTTGCTCATTGTCAACCAAGAAATGCGGAGTTTTTAGTTCCTTTTGAATCAAAT
GTTTATTCCTACGCTGAATGTCAAATTTCTCAACCCCTGGATGCTCAGATTGATCAGAAG
GGATGAGAACTACATCAGATTTGGTGTTATATCCTGAACCGTTTACAGATGTTTTTCCAA
ATCTCCATGGCTCTAGAAGATGAGCATTTGTAAGAAGAAGACCCTGCTTGTTGAGCAAA
ACTCCAGAAGCCCATGCTCCATCATCAACAGTGATAAGGCAGATAGATGTCATTGCCTT
CTCAATCAAGGATGGGGGAACAGGATCTATTAGGAGATGCTCTCGAGTATCATTGGAA
GGTCCATTCCGAATATTATTGGAGGGTGATTCATTTTTAACACTGATTAGGTTTCCATTA
TCAAAATGGATCTTTCTCCTAGTTTGTAGCTCTTCTTTAAGCAGGCTACCACAAGCAGAT
GTAATAGCTTCCCATGGAATCACCATCTGCCACCCAATGCTTCAATTTCAAATTAAAGCA
ATTTATGTGAAGATAGATCTCAGCAAGAACATAGAGCACATTATGAAATGTTTACCTGAA
TTTCAGCAGCAGTAGCCCTTTGTCTGAGTGGCCGAGACAGAACACCAATAAGCTCTGC
ATGTTCCCCTAACACTGGGCTACCTTCCAT
SEQ 67
CTGGATATAAGTTTGAACATGATCCTTCCAGAGAGAACTTGTCTTCAAAACATCCCTTAG
GGTTGATAGAACTTCAAAAGATGTCGCCTTTATAACATCGTCATCCTTGTTGTACGGCTG
TTCCTGCAACATAATTAAGAAAGCAAATTTTAGAAACAATTTCAAAACTGAACATCAAGC
TTTATGAGTTTATCATTGCTGGGTAGAAAGAATGCACAAAAAACTGAGGCATGCCTTGA
GATGATCAACTTTCACTGTAAGGGGTTCTTCACTGACCTGCAAATGAATGCCACTGTTT
CAGTCCTCAAAGTGTTACTCTTGTACATATCACAAAATGGGCTATCGAGACGGGAAAAA
ACAACATGGTGAATAAAGTAAGGAAATCTGACAGTGAACATTCAAGTGTGACAAATCTA
CTGCATAGTCATCAAATTGTTACACTAGTATATTGAAGAAAATTTTTATTGAAACAAAAGA
AATAACTACATAAGGGAATCTGACTGCAAACATCCAACAATAAATAAACCCAGTGTAATC
CCACATGTGGGGGTCCAAGGAGGGTAGTGTGTGCGCAAACCTTACCCTACCTTGTGAA
GGTAGAGAGGTAAACATCCAACAGTATGTATAATCTAATAGGAGAATTATTAATAAGGAG
CTCAGGGGTTGAGAGATTTAAGTCCAATAGAAGAGGATAAGAGGTCCTCAATCACAAAA
TAAAACGAAAAAATAAGAAGACATAAGACCCTCCAATGGCTAAGTAAGCCCATAAATGG
CTGACCATGCTTGAGTACTCCAGCTTTACAGCTAAAGCCAAGAATACGACTCTATACCA
AATTAGAGCTCAAACAAATAGGATTCTATTCAATCTTTTATGTGTTTTATATATGTTTAAG
CCCCAGGGCTTTGGTCTAGTGGTAAGAGTACAGCCCGTGATATGTAGGTTGGGTGCAC
ATCACAGTTCGTGCTCTGGCGCAAACAAAAGCCTAGTATTTAGGTAGACAATGGTAGAA
TGGCGAGCCCATTATCCACCGAGTTTGAAACCATGAGCCACTTACCCTCAGATTTCTCG
GTTATCAAAAGTCTAGGATTTCATTCAAACCAAATGCATCGGCAATCAAACAGATGCTAA
ACTAGCACATCATAGAAGAAACTCAATAGCTTTTCTCTTCTACAACCCCGAAGTGCAATA
AGAAAGACATTCCTATGACTTTGCAGGAAACCAGTTGTCCAAAATTATTACAAAGTGCTA
CTTTCTGTTGCAAACAAGCAATCAAGAATAACTAAAAGAGTGTTTCATTCTATTGGTAAC
ACATCATACACAACTGGGAAAAACAGCTCATTTAGCCTCAAATTGCAACAGACCTCTATC
GCTTGACAACGCAGCTGCTCAGTTATATGAAGCCAAAAGGAGAAAGACTGGGTGTTGG
GACACAAAAGGTAGGAAAGAGAGAAAAGTATACAAGTGCAATGAACCCAAGATGTCAAA
TCGGCAGTCTCAAAATCAGGAGATGATGGATATGTAGATGAAAAATACAACTAAATAGG
ACACAAAGAAAACATATGGAGCTACTTATAACCAAAAAATAACGCAGACATTTACTTACC
ACCTCTGTCATACGTATCCGCCTGTGACCAATAAGAATAACCTGGTCGTCTTTAATACTT
GTTATCTGGCTCATCATAAGTTGCATCAACCTTGATCAGAAACTTCTTCAATAACTTAAA
GCAACAGAATAACACAAGGAACAACAAGATGTACCTGAGCAAGTGTACCAACTTCATGA
AGACGGTTCAACATGTCTTTTCCTTTAAGCTCATAGATGTTTTTTTCTGTATCTGAGGCA
GACACAACATTAGGATCAGTCCCTTGCTCGTCTTTCATAAGGAAAGCGCCAGCATAAGG
TGCTTGCCTTTTTCGACTTTCCAGCAAGGCTGCTAATACCTTGGGATCCTGCAGTTAAAT
TTACGGATTATGTGGAGCCTCAGATCAATTTGTTGCATGCCATTACAGTATAATTTATCT
TTTTCTGGAAACTAACAAATGAGGCTAAAGAATATTACAATTGAGCAAAGACGCTCTCCG
AATTGAAGGTTTTAGCTTTTCAAGCTTACAACTTCAGCCAAGAACTTTCCATCAATTAAA
GTAGAGCATTCTTAAAGCTGAATGCTGGTTACAGACTTAAGAGGAAATAGGGTCCAAAA
CACTAGCTGAAACAGTACAACTCTCAGAAAGTTGACAGTAATTATACACTTAATGTTTAA
AGCTTATATCTATTTTATTTTGAAAATTACGAAGACTAAGACATGGTTTAACCCATCCTAG
ACAAGGTACCATACCTTCACATAAATATGCATATAAAACCCTGGAAATAACGGTCTGTGT
GGAAGTGGCAGTGCTAGAACCTGCACCAAGAAAACAACATGCATCATTATAAATTATAA
AGAATTAAAAAAGTACAGCCCACACAGACTTTATTTATTTTTAGTATAATAAATGACATAA
AGCCCTTAATTGCAAGTCTTACAGGTAAATCTTATCCAAAGATAAAACCATAACCAACCA
AGAAGGCAAGAAATGGGTCGCATCCATTAAATTTACAAACAGATGAATTATGAGCAAAC
AAGAAGCCTCCAAGAAACAGTGTTTTCTTTGCATTCGTTCAGTATCTCTCTTTTTTAGGG
AAGGTTGATAAATACCATTTTTACACTGATCTTGCAACAACTAGCAAAAACTGAAATACA
CATATGAATCTTCCTTTCAAAGAAAAACGAGATAGTAGGGCAACCTATTACTTTATCCTC
ACATGTACTTTCCAATGCTTTACTTCTTAAATAACCTAGAAGCTGTTGATTAAATTGAAAC
TAAAGCATGAAGTAACCCTCTCTAGGCCTCCAAATATAGGATGAAATGTTAAAAATTAAC
ATCCATCAAGGTGCCTTCTGTACGGCCAGAAGTCAGAGGCATGAGGCATAACTGGTCG
AATGTTGACTCTGAAAAGAGCATATGGGAAGGAGAGTATTCTAATTACAATGGACAAGC
AAACAAAAAAAAATTCTTTTGCTGAACAATGTGAATCACCAGCTTCTTGCAGGTGAGAAA
TCATTCAAAATCATTAGGAACTTTCTGAAGCTTCAGTCTTGACATAGAGCTGATCAATTT
GCCTCTACAAGGTGGGAGTTACACATGGTCCAGAGAGAGACAAGGCAGGAAGTACTCA
AGGATCGACGGGTTTCTAATATCAGGAGATTTCAAAGAAACAATCTCAACCAATACGGA
TGGTTCAACTGACAATGTGCTCAAAACAAATCAATCTTCTTGATTATGGGATTCTCTGTA
AAAAAAATAAGCCATTTAAATCTGAAAATTGTGAGACAATAGAAGAAGCAGATGAAAAGA
TAAGTTGATGAATACTTATTACATAATACATGACACTTAATTTTCAGGTGTGAAAAGAACA
ATAATCTTTGATGTTGGACTAACTTAACATTAACATTCTACTAACTAACATTGCCATTGTA
TTATGTGTCCTCGAACTCAAGGTAAGAAGAAGTGAAGAACACCTTGAATTTGCTTTTCTG
GAAAACACGGAATAGTGAACAATAGTCGTAATAGACTAATAGTAAAGCATCACCTAGAA
AGTGAACAGTTCAAATCGTGATCAGTCACCAGAACACCATAATGGATTTTTTCGCTGAAA
GTCACGAAAATAGCCCAGCTAAAGAAATCATTAATATTCAGCATAGACTAAGGGAACCG
ACTCTCAATGACCAGAGAGAACGCGATACCAGGAATCTCAAAACCAACCTTGGTGTGG
CGTAAGGTGGCAGCTAATGTGGCTCGAATTGGCGGCTAAACAGTGACTAGAATAGCAA
TGAAATAGCGTCCAAAATAGATATCTGGAACAATAATCATAATACTGGCCTGAAAGATG
GTAGAAAACTCATTGGAAGAATGGCCAAAATAGTTCTTTTACACTGTAAATGGGACATG
GTTGGGATGGTGGCAGAAACTCAATGGAAGAATGGTCAAAAAGGAGGAATTTTACAGC
TAAAAAGATGACTGAGAAAGAGGCATGATACAGTCAAATGGTCTACAGAAATAGGTATG
AGGTTAACGATCACCAAAAGTGGAAAGAATAGTAAAAAAGTTGACCAATCGGGTAGCAT
AGGCTGCCCCTTATTAAGATCACCAATGGTATGTGATACGATCTGAGAAAATAAGAAAG
AGGATGAATTGGTAACTTGATGAAAATTGGAATACAAGACACATCTATTTGTACCTAACA
ATCAAATAGAAAAGACACATCTATGTGTAGGTGAGAAATACATTAACTTTATGATATCTTT
CCAATGTGAGACTAATTTAACACTACTAAGATAACACACATTAACATTTGAACAAGAACA
AGTGGGTGCTACAAGATGGTCAAGGGATGACAAGAATAATATCACATTGCCGAAAATCC
AAGCTGTGTGATTGGAAAAAAACTTGAAATTACTTACAGATGATCTTAGAAGATGAAAAT
AGAGAGGTATATGCTTGAGCGGAGATGGAGATGAAAGAATTGTTGGAAAAATTGAAACC
TTTAGAAATCATTAGGTGAAGCAAAAGAGATGATTGCAAATGAATTACCCCTAATGGAAG
ACTTGATTAAGGAGTTGGCAGACTGTGCCTTAGTGGAGGAGGTATCAAGGAAGCAAAA
ATCAATAACATTGTGGTTGAAGGAGGGGTACAGAAATACCACATTCTTTCTTCCTCCTCT
TCTTTTTTTTTTTTGGAAGAAAGTGGAATACCACATTCTTTCATTGAAAGGGTAATGCTAA
TTCAAGCTACAATAGCATTAAAAAAGTTGCTCACTGATGAGAGGCTCTCTGACGATCCT
AAGAAGATTCAGGACAAGAAATCTTTAAAAAGACGACTAGATTTTAAAAATTTGTCAATT
GTCATTTCATTAAAATACTAATGCTAATTGAAGCTACAATAACATTAAAAGTGTCGGTCAT
CGATGTGAGGTTGTCTGAGGATCTTAAGAAGATTGATATCAAGATTCTTTACCACTACAG
CCTGATTTAAAAAAGTCTACACTACTATTCTTTCGTCTCAAACGGAATGGCTGGGTTCAA
AATATGAGAATCAAAGCATCTGATAATAAAACCGTTCTTTTTGAGACAAAGAGGGTATCA
AAAGCTGTTCTTTGGAAAATAAAATGTTGAAGACCTTCACAGCATTATATCACGTCAAGG
TTGGGAAGGCCTTTTACTAAAGAATAATTGAGTGTACAAGTCTACGAGAAATATAATCTT
GGCGATCCACCTTTTATATCCTAGAAAGTTAACTTCTTAGCCAACCATCCCTTTTGATTG
CCGGCAGAGTGTTGCAACCAAAGTTAAAAATATTTTCTATATCAAATTGATCCCAATTCT
GCGTCAATGCCAACCACAAAGATTAGAAATTTCATCATCAGCGTCCATGTTTGCATCCAT
ATGTACAAATTTGTATAATAATGAATAAAATCATATCACAACTACCCAAAGAAGACATAAA
ACCAGCACTAACAACAGAAGGAACTCACTTAATATCTTCTCTTTTGGTGCACAATCTGAC
ATGGCCACGCCGTTATAACAAAAAGTTGACATCTTTTCTTAAGGAGTCATTTTACCAGCC
ATCAAATATTGGAATAAAATGTACTTATATAATGATGGAGCAGGAAAATACTTAATTATGC
GCCAAATTATATTAGTTAATAACAATGAAGTGATAAATTGAACTGAGAATGTACATTAGTT
AACAAAAGTCATAAAATTTATTTTAAAGAGACGTGTAATTCTATTGGTGCGGGTGCAAGA
AATTATTATGAACTAACCGTAAGGCAATCTTCAGGCTTAAAAACAGTAGGAACAATAGCA
GCGGAAGCCTTAGAATCAGCATCTCCGCCTTTCTCGGCCGGCTTGGCTTCGGATGCAG
CAGCTTCGGAATTCGATTCGGACCCATCAGTAGAATCCGAACAAAAGAATCGTCGAGAC
AAATAAGGGCCCCTGCGATTCGAACTTCTTAGCGAACCTAAAACCCGAAGCAAGGGCG
TATTCGAGTCAGTGCCACGGCGAACTTGAGGGGTAAATGCCGTTGTGACGGCGTGGAA
ACGATTCTGCAGACATGAGGATGTGAGAGCCTTCAACAT
SEQ 68
TCACGCAGCTTCAGCAAAACCCAGTTGAAGATTACCATAGTCAAATACAGTATGATACA
CCCCCATGAATACATTACCAAGAATCCTGCATGTACATGAATCTTTTCGTATGAAACAGA
TCGAGAAGCTTTTGAATAAATTGAGGTATTCTTGTCTATGCATGCAATTTCTATGACCTT
ATTAAAGCGAAATGGTTGTAAGAATAATAAAAACGTACCAAAGAGGACCACGAGGTGGT
GGCACATCCAAAGCAACAAACCCACTGAGGCAAATGGTAGCAATCCCCTCTCCAGTTTT
CAAAATATACTGGAAACAGAAACAAAGCCACAGTTGAAACAAGGCTGAGTATGCAACAT
AACAATGTAACATATATAAAATTAGGAAGAGAGGCATAACCTGATCTGGAGTCAGGACA
AAATCCTTATCACCAATATTGAATGTAACATTTGGCATGGATGATATGCTATTGCAGTCG
ATTACGGATTGCCCCATAGGACTTGGTAATTTCTCACAAAGCTGTGAAATACCAAACATT
AGGCATTAAGACAATGCTCTGCACTACTTAAAGAGAAAATTCACTCACCTGATTCACATA
TTCTAGCACACTCTCCTTTGTTGTCTTCTGTTTCAGCTGGTTCTGCATCCAAATTACAGC
CATCTCACAGGCAGTGCACAATGGGGCCTCTCCTATGGAACTTCCTTCATTTTCCTTCT
CAACCACACTTCTGATATTCGAGCTGCAAAATTGGTTGTAGATTGTCACATGGTTACACA
ATTCAACATGTATTGTAACAGACATAGATCCTTGGTTCAAATCTCATTACCAACCTTCAT
CATAATGAATTTCCAAGTACTAGGCCCATGAAAAGATCATACTTACACGTAAGAGAGCAT
GTCCAAGATATAATAATAATTGAATAAGATTGTGACATCTTTGACAGCTTAAGTTTTTAAA
CGAGATGGTTACACAATTCAACGTAAACAACATAGCTCTAGAGCCTTGACATATGTTCC
AAAGACAGATTGTCCAGTTCAATTTAGTAACTTCACCAAAACCACCTTAATTCACATATG
CTCCAAAGAACAGGAGAAAAGCATCCATACCTCAAATGCTGAGCTCCATTAAGATAACA
TAAACCTACTTGTAAACAAATTTGATCTGGTGTGACCTGCAGACAATTACAAGTAGCATT
ATATCTACAATGTCACATGCAGTAGTGGCCGGCTCAAATAAATAAAAGAAGAGAAATAG
AACAAACCCCTGATACTAGTAAATCCCAAATCATTTCCCCATATTGAGAAATGGTTTCTT
TACATTCCATGCTCAATACTCCTTCTGCTCCAATGGCATGGTTGACTTGTGTCACAACAG
CCTGTTATGTACTTGCTATAATTACTTTCAAGAATTTGTTCAAGATAACTAGATAGTCGAA
AGGTCTACAACTTCTGCAACAACCCAACTAAAGTAAATCATACAGTTGGACCAGCAAGC
AATGATGTTCCAGAATCAACTATAGCAGCACAACCGCCTTCACAGAAGCCTGTAAGGGA
AAAGTATTAAGACAAAAAGAAATTATTCTTATCTTAGGCTCGTAATCAACAGCAACGCTC
ACCTGTTGATTGGTTCCCAATAGAGAAATCTCCCATTTTAAACTGAAACAGAAAAAGGAA
AAGAACAGATGGGGGGACCGTGAAAAAAGGCAAAAAGGAATGGAAACCATAGTGGAAA
AAACAATTCAAGTACCTGCCAGTAACCTTTCTGAGTCAAAGGAACATAAGTATGTTTATC
CTTGAAGTGTTTTGGATCAACACCACCAAAAACAAGTTCACCTCCCTCTTTTGCATTTAT
ATCGCGATTAAGCCAGAAAGAGAACACAGGCTCCTTTACGAGATCTTGCTTCACCATAT
TGTACCTGCACATATATCATGAATCAAACAGACAAGATTCCAAAAACTGAGAAGAAAGG
AAAACAAGATAGAATTGGTTAAAAACTGAACTGAACAAATCAATTGCAGGCCTTATTACC
AGACAGGTGTAGTGTTTCCAACAGCAATTTCCTTGAAACCAAGCCCAAGTATTCCATCA
AACTTTGCAACTATAAATGTAACACTTGATTCCCGTGTCGCCTCAATAAAGACCTGAAGA
AATTGATGTAAAAAATTCTCATCCATTGTGTTTTCAGAAGAGCAGAAAGGACCATAATAT
GAGGCAGTGATGACTTATTGCCAAGCAAGATTTCACCTGATCCGTGACTACAAGATCGC
CAACTTGAACATTATCTTGACTGAGAAATCCTGAAATTGATCCAGATCCATAGTGGATTG
AACAAGATTCTCCTGGATTAGAATAAACATCAAATATAATCAGAAGCCATCAATAAATAA
CTTCTTAGTCTTTCAATTAATGTGAAAGAAATATAACATTAAACTATGATATGAACATCAC
CTTTTTTTGTGTATGTACTAGACTTCCTTGCCTTGTATTTGGAATGGATCCAGCATGCAA
TCTGGAAATAATTCAAGTTTAAGGAAAAATTCTGTATAAACCGGTAATTCAACAAAGGAA
CAAATAACTAAAAGAATTCAAGTTATATACACTAAAAGTGTAAGGATTTTTGTTACTATCA
GTATAGTTTAACTTCTGATAGAAATAATTAAGTACCAATTATTGTTACCAATTAATGTTTT
CTTATAGAGATTTACATGTAATTACCTTATAAGTGACCTGATTATATAACTAACCTTTGCA
CCGTTAGCACATATAGAACGTAAACATTAACTAAAAAGAAGCACAACTTACAGAGAAATA
ACATCTTGATGATGGAACCCAGAGATTAGAACTTCCTGTATCAAATATGACAGTGAAATT
TTGAGGGGGTGAACCAATACTAATATCTCCATAATATTGAGCATCCAAGTAGTTCTTTAA
GGACACTATATCTGAATTTGTGTCAGATTTCTTCTTCTTCTTCTTCTTCTCTATGTCCTTC
ATCACATGCTTTCCATATCTGTCTTCAAGTCTTGCTACATTGGCTACATTTAAGCTACTG
ATATCTAATTGTCGCTTCTTCAGACTAATTCTTAGCAAACTATCAGAGGAAGCAGGAAAT
ACAAAGCAGGCAATGGCCAATAAAAGGAGAGCAGCCCAAAGATGCTTCCTTTCCAT
SEQ 69
TCAAGATCTTATTACAACATACTTCTATTACAATATCTTTTTCTTTTTGTAATGGCTTTGAT
CCTTGGATGGAAAATACTATTTATCCTTCTTTTTGTGATAATTGGGATGTGTACATCTCAA
GTCACTTCTCGTAATATTCAAGCTTTATCCATGTTAGAAAAGCACGAGTTATGGATGTCA
AGTCATGGACGTACTTACAAAAATGAAGCAGAGAAGGAAAAGAGATTGAATATATTTAAA
GAGAATGTGAAATTTATTGAGTCTTTCAACAATAATGGGACTAAAAAGCCATACAAATTA
GGCATCAATGCATTTGCTGATCTTACTGCAGAGGAATTCTTGAGTTATTATACTACTGGA
CTTAAGTTGTCTAATTCCTACTCTCAAATTCAATCATCATTTAAGTATGAAAACTTGAGTG
ATGTTCCATCTGTTATGGACTGGAGAAAGAGTGGTGCTGTCACTAGAATCAAACATCAA
GGTCAATGTGGTAAGGCACAGTTTCCTATTCAAGAAAAGTTTCATATTCTCTTCTTATTA
AGTGCTGACGTAACTAGTAAAGTTGATGATATGTGACCAGCAGGTCACGGGTTCAAGTC
ATAGAAACATTCTCTTGCAGAAATGTAGGGTAAGGCTGCGTACAATAGACCCTTGTGGT
CCGGCCCTTCCCCAGACTCCGTACATAGCGAGAGTTTAGTGCACTGAGCTGCCCTTTTT
ATTAAGTATTGAGAAAGGATTTAAGTAAAATACTACATACTCCTTTCAAATTTGTGATCTT
AAACATGTTTTATCATTGTATTATAACGGAGTATCACTAAGGTTAAAATGAGAATATTAGA
AGCAAGCATACTAAATATAAAAATACATTCTTTCTGTAATAGACTAAAATGGAAAATAAGA
TATGCATAGAGTACTCTCTTCTTGTCCAATAATGTTGACAAGGCACTTAAATTATGAGTG
TGTGAAGTCTCACATTGGTAACTGAAAAAATTAGGAGTCTACATATAAGCCTACATATAA
GGTTTAGAGTTTTTTTATGGTGTGAGGTCTTTTGAAAAAAATCGTGCGGACTTAATCCAA
AGTGGATAATATCACACTATTCTAAGAGTATCTTTGAGCTGTTTTAGCTCAACAACTCGT
ATCAGATCCCAGGTTCTGCGGACGAGCATAGCGATGGCGACCTGTGGATCGTGGTAAT
AGCCACATGAAACTGGTTCGACGGGGAGACCCGTGGATCATGATCATGGTAGTGAGCC
ACATAAAACTTAGTTCGAGAGAAGGATTATTGGGTATGCAAACAAAGTCTCACATTAATA
GCTAAAAAGTTTGGGAGCCTGCATATAAGGCGTAGAGAACTTTTAATATTGTGAGTCCT
TTTGGGGAAACCGTACAGTTTGGCCAAAGCGGACTATATCATACTAAGTTAAGAGTATC
TTTGAGCCATTTTAGCCCAACAAATCATATATGATAATTTAAATTTGTTTTACACTACCAA
TAATGTATTTGACCTACTTTGCAGTATAGTTACTATTTTTGTATGTTTATCATAAAAGTTAA
CCTTTAAAACAATACAAGTGATATGATTTGTATAAATATGTGCATAGAACTTCCAACTCAT
TAATAAATTGCATGAAATATAGGATGTTGCTGGGCATTTTCAGCAGTTGCAGCCTTAGAA
GGAGCAAACAAACTCTCAACGAACAACTTGATTTCACTCTCCGAACAACAACTGTTAGA
TTGCACCACCGAAAATAACGGTTGCAACGGCGGTTTAATGACCACAGCCTACGATTTCA
TCATTCAAAATGGCGGCATTGCCACAGAATCCAACTACCCTTACGAGGAATATCAAGAT
TCATGCAAAAGCCAAGAGATGAACTCTGCAGTGAAAATCAATCGTTACGAAACTCTGCC
CTCGACTGAATCAGCATTGTTAAAAGCCGTAGCTAAACAACCGGTCTCTATCGGTATTG
CAGTGAATGAAGATTTTCATCTGTACCAAAATGGTGTTTACAATGGAAATTGCGAGGGT
CAAGAACTAAATCATGCAGTTACTGTAATTGGTTATGGGACAGAAAATGATGGTACAAAA
TATTGGTTGATCAAGAATTCTTGGGGGACAAGTTGGGGTGAAAATGGTTACATGAAAAT
TGCTAGAGATACTGGAATTGAAGGAGGTCTTTGTGGGATCACCACTTTAGCTTCCTATC
CTGTTCTT
SEQ 70
TCATAACTTACTGTGCACGAGTTTATTTGAAAGACGTTCAACCTTGCCAAGTTGAGTTGC
ACTCTTCAGCATCGCCTCGCTGTCAGCTATAAACTTTGCAAACTTAGAACCCTTTGTATC
ACCATCACTATCTCCTCGAGGAAGCATTGGCAGATGAAGCATAGAGGGACTTTGCTTG
GAAGATAAAGGCGGAGTTAATGCCCACACAGAAGAAAGCTGTTCATCTGGTTTGTCAAG
ATATTCCAATGATAGATTCTGCATGTCTGTCAGGAAAAACAAAACAGAAACATCAGACGT
TGGTATCGTGCCTACCAAGTGTTATTCGGAACAGATTTCGTGAGAGTTGCGAAACTTAT
TAAGAGCTTACGGATCAAAGATTACTGCTTTTATTCTTCATACGGGAAAAAACCACCCAT
TATCTGAAAATGGAAGTATCAGGAATAGTCGAATAAAGTACCTTCAGCAAACTTGAAGAT
GGGCTCTAAAGCTGCACATGGAATGCTGAAGTTCAAATGTGGAATGACCGTCCCTCCA
CCATGTCTAGCATTACTGCATCAAAAATAAAGCTACAAGACATGAAGTTTCAACAAGAAA
GACATTAATCGATGGAAAAACTATAGAAAGACCATGATATGTGAAGATTAGCATAAATGA
GATGACTGAAAGATCTTCCATATGAGATCATTCAAATTGGACACCATTATTTTTTTCCTGT
ATGCAAAGCGTATAATTAATATACATTTTTGGTAAGGACAATTAATATACATTCAAACAGG
AATATCTTTCTTCAAGGACTTCTCAAAGTACTCCAGGACGCAGTGTACCACAATATCATT
AGATTGAACTTCAAGAACAAACACACGTAAACATACATAAGCTGAAAAAGAAATATCCTC
AATTATAAGCATCCCCAGTTGTCATCCAAAAGTTAATTACCTTGTTACAAGGGCAATCAT
GTGTCCTTCTGAATTAACAACAGCTCCACCACTACCACCAGGGTGTACAGCAGCCGTTG
TTTCAAGCATTGCCGGAAAATGTCCTCCTAAACTTGATTGGTTGAGCAGAGGCCGCTTT
GCTTCAACTACCTTAGCTATTGCACCCACACAAGCAGATGGAAGGAAGTCTATATTATA
AGAAAAAGTAAGACAAATTACAAATATAACTAAAGATGTCTAAATAGGTATGAAACATAT
GAAATAAATATACGGTATTATATCATGTTCAAAATGAAAGAACTTAACAAAATTATTTACA
TGAAAAGCTATTTAACCTCCAGAGCAACATGATTTAGTACTATTGGGCGCACAAAGATA
GTCAGTTCCAGAAAATTATGTTCAGCAAAGGTTATGGAACAGACAAGTTAACTTTATCAA
CGAAAAAAGATGGAACAGACAAGTTAAGATTGCATCAATAAACAATAGTAGCACTTCCA
ACAACCAAGCTACTATTAAAATATCCTTGAGATACAGCCGACTCGATTAAGTGAGTTACC
AGGAATTTCCTATTTTAAAACCCCATTCTTTAAAGCTGATCATTTGTACTTGCTTTCACCA
TAGAAAATATCAATTTAATGCTCCAGAAATTTACCTCTTTTCGTGATAAGTGACTTCAAAA
CTCTAGATTTGATTCCCCAATTCCGCTTTGTTAGCATAGGTATTAGGTATATGATCATTC
TTATGGATGAAGATCTGAATTAGTGCCTATGGCTTTTATTAGCCCACGAAAAGAAAACG
CTTTTTTGTTTTTTAATTTGGTCTACCTTTCTCCTTGTTCTACTAGCCTTGTTTGAGCCCA
ACAACAACCTCGCTATTCTTAATCTGACAAGTGCAATTTTTTTTAACCGGAAGATCAAAA
CGTTAACCTGGACTACAAATCAAATTCAGTATCAATAAACAATGTCTTCACCTAAAAGAT
TACCCAGTTTTGAGCCCTCCCGACCAATCTGGTTACTATTTCTCCACTGGAAGACACCT
CAAGTTCCCTTGCGGAGGCATCGACATCACCTCATAACTACTCAATCAGTCATCAAATG
GTCATCATTTGGTGAAGGAAGAAACATCAAGTATTCCAGCAGTAACAAGGACATGAAAA
TGATATAATACGACCCAATCCTGCAATTGATTATAATGACACTTCAACAAATTCTTAACAC
GAGAGAAGCAAGGTGGAAGAGAGAGAAATTCAAGATAAACAAAGATTTTGTAGAATATT
CTAAAATTTCAGATTTACTGTGATGCGTGTGTCCAAATAAAAGTAAAGGCACAAATTTTT
TATTTAGACAAGAACATATCTAAAGCAAGATTTACCACATCGTGGTCCAAATAGCCCATG
TCCGAGAATGTATGCTTTTGATCCGGGGGATGGGCACATGAAGTCAACAATAATGGGA
CAGAGCTGATCTGGAACTAGCTCAAGTTGTAGTAATGCAACATCCAGAGGTCCTCTGGA
GACATGAACTACCTTTGCATTTGTCCATACCCAGGGATCCATAAAATCCAAGCGAACAC
GAATGGTCCTACTGCCTGTGTTTGCCAGGTTAACTCTAAAGCTACATTGCTCATTGTCAA
CCAAGAAATGCGGAGTTTTTAGTTCCTTTTGAATCAAATGTTTATTCCTACGCTGAATGT
CAAATTTCTCAACCCCTGGATGCTCAGATTGATCAGAAGGGATGAGAACTACATCAGAT
TTGGTGTTATATCCTGAACCGTTTACAGATGTTTTTCCAAATCTCCATGGCTCTAGAAGA
TGAGCATTTGTAAGAAGAAGACCCTGCTTGTTGAGCAAAACTCCAGAAGCCCATGCTCC
ATCATCAACAGCGATAAGACAGATAGATGTCATTGCTTTCTCAATCAAGGATGGGGGAA
CAGGATCTATTTGGAGATGCTCTTGAGTATCATTGGCATGTCCATCCTGAATATTATTGG
AGAATGATTCTTTTTTAACGCTGATTAGGTTTCCATTACCAAAATGGATCTTTCTCCTAGT
TTGTAGCTCTTCTTTAAGCAGGCTACCACAAGCAGATGTAATAGCTTCCCATGGAATCA
CCATCTGCCACCCAATGCTTCAATTTCAAATTAAAGCAATACATGTGAATGTAGATCTCA
GCAAGAACATAGAGCACATTATGAAATGTTTACCTGAATTTCAGCAGCAGTAGCCCTTT
GTCTGAGTGGCCGAGACAGAACACCAATAAGCTCTGCATGTTCCCCTAACACTGGGCT
ACCTTCCATTCCTGAAACATAAGGTACCATACGTTATCAGGTACCCAAAGATGGAAAGG
ATTAATTAACTAAAGTTGCAAGGCAAAAGCTCAAACCAGGGAGACAACGGATGTCAGCA
ATCAACAGTGCTTTATTCTGTGGACTAGGTGGATAGCTGTTTGCAATGGACCCAACTGA
TATGCTGTATAGCAACAAAAGATCAAATTGAGCTTTCACAAGGAGATGTAACAAGAATCA
AAGTGAATATTAATCCTATGTATGATCACAACTTGGCAGACAAATAATCATCGAACAACA
TCTGCATACACCAGATACAGCTTATATAGCTTACTCAAGTAAAGATGAGCTAAAACATCT
TTAGCACTAGCAACAAGAATTACACCAGTGCTTTCATATTCAGATAGTCTATTAACACAG
CACAAATGTTCAGTCATCATACATTTTGATGCTGACAAGCAAGGATGGAAAGATTACAA
GAAAGTTGTAATTCCAACATATGATAGAAACAATACCAAAGCAACTACCTGTTGAAAAAG
TGACTGGGAGACAAGATACCGAAAGGAGAACCCATACCCAGAAGAAGATCACCTCTCC
TACTCCAGGTAGCCACTTTTAATGCAGGCAGGTCCTGAAAGGAAATACCTATGCAGTCA
TTATCATCAAAAACCTACTAAATGGAGCTTTCAAAAATTACCAGCAAAAAAGCAAGCCCA
TTCAGCAAAATGCAATGCCATGCTTCATTTCACAAGTTTGATGCCACTTAGTGCAGTAAA
AGCCTGAAACCTCATATGGATTTGAAGAAACTCTGAGAAGAGCAATTCTTGTAGTTGAT
GTTCCTATCACACTTGGCAGGCTGGACTGCGCCTCCATCATTGGAGTTTGACTTGGGAA
AGAAATTTTCTCAACCTGAAATTATCAGTTGACAGTTCCTGTTAAAAAATAGTCAATCTAC
AAAATCAATCTCCGTGGTCCTTTGAGACTAGCATCTCATAGACCTTTGGCTATGAAAACT
AGAATGCTTTGTGCAAAAATTGTTTGGGCCATCTTGAACATAGTACTAGGGACAATTGA
GATGCCACCGTTGAAGAACACCATGGTAAGAGTTCCTTATGTCATGCCATTTTGCACTT
GACAGCGTGAGACTCAAATGTGCTCCTTTCCAATAACACTGCCGAATGCTTATACCATT
ACAAATATGTAACCAGAGTAGCTTACTGAGTTGGAGTTCTTAATATGAATTATTTTAAGA
AATGCCTCCAAGTTTTACGGGTGGTAGACTACCTTGTATTCAGACACGGGAAGGTGATA
TTCAATCATTAATCTTTGAATTGGAATTAGGTGTTGAGACATTCTATGATGATAAAGAGG
CAACTATTTTGGCATGAGTAGAGACATGAAACAATGTGATGTCACTCTATTGTAAATATA
GGGAGCATGAAATAAGGAACTCATTACATGAATTTCCATTATTCTCCTATAAAAAGAGGT
TACAGAACATATAAAAGGTTCTGCTTGGAAACAACTCAACTGATAATGCAATTAATGCTA
AATATATGGAGGAAACTTGCATGTTCCACAACTCGAAGAAGTGGTGTGCAACATATATT
AGTTCAAATCCATACTGCTCTTATGCCAGAAAAGAGAAGAAAAAACAGAACCCTGAAAG
TGCAAAGTGGTCATGATTAGACGTAAGACAGGAATAAAATGGCATTTCTGCTCAAAAGA
AATAGGTGCTTGATTTATTTAGTTATTTAAGAATGATAAATGATATGCCTTTCAGTTGATA
GAACTTTAAAGTGTTAGCCTGATAAAATTATAGTTATTTGATGAAGTCTTTTGAAATTTGA
ACCACAAAGTGGGATCATAGCAGAAGTTAGCTCATGAAAAATGACCAAGGATCTACAGC
ATCCAATCAAAATATGCATGCAAGAGAATTTGGCTTATCTTGGTCTCGGCGACATTTAAT
TATCTTTGAATGGAAGTATTGTCATGTTAATCCTATTTATGACTATGTTATGCATTAATGA
AACAATCACCTAATTCAATAATAACACAGCTAGATAGTGTCAGGAGTATTTAGAAAGCGA
GTGAGAGGCTCGGACACATCTATCAATAGGTTGTACCAATCATATATAGATGAAGTACA
GAGACTATGGTTACATATTTACTCATTAATACATAAAGGTACAGAGATTGTTATTGGGTA
CACATTTACTGCATGTAAGTGCCAAACAGAGGAAACATCATACCTGTGTGCGCTTAGTG
TTAGTAAATGATTGACGGGAATTTCCATAGGCAGCTAGGGACCAACCAACCTCCCACCC
ATGTTCAATTGAACTAGACGAACCTTCAACTAGGGACTGGACAGCAGCAGATGACACAG
GGATGTCAACCTTCAGCAAGAACACCAAATAGACGGTGTCAAGTGCAACTTTTACGTTA
GATCAGTAACAAAATAGCGACAAAGAAGAACACCAGCCATAAAAGTGATCAGTTAACCC
ATGCTAAAAACTAGGATAAAGTTCAAAACTAGGTATTCCTTCTCCATTTTATACGGCACA
CTTTCCTTTTTAGTATGTTCCAAAAAGAATAGAACCCTTCTCTATTTGGAATATCTTAAAA
CTTTAAACTTCCCACTTTACCTTAATGACATGCTCTTATAGCCATAGAAGTGTTATGAAAT
GTTTAAAACCACAACTTCTAAAGGTAATTTGGTATGTGTCAAAATCTTTTGTGCACGGGC
ACAAAACACCAGATGACATCAAACTAGAATTTATATGCATGCATCAAAATGAGAGCACTT
ATCAATTCAATATTGCAAATAAAAAACATATATAAGATAAAGTAACAGGTTTTATGATAAT
CAGCATTCAGATTACAAAATCCTTTCAGTCTCCTACTAAATCCTACCACTCTTAGGAGTT
CTGCAGGTAGCCAGTTCAAACCCTCTTTGTTGGTCACTTTGATATCATTTTGCAATGTAT
TTCCTCCCTGTGAACCACGAGCAGGACATCCAATGTCAATTTAATATATCAATGAACCTA
AAAAACGTATTTTCTTCCGTAGGCTCAAATAAATACCTCCCACAGTATATCAATTTGAGC
ACCAGGAATCAGCTCCGGCTTATCCTGCAAGATGGTACATTGTAAAAGAATTATGAAAA
AGCATAACGACAAAGAAATAATCATGTTGTTCCATTTTATACTACATCCATTCAAAAACCT
ACCTTTCTATACATAGAATTTTTTTAATCTTGTAATTCTCATTTTGCACTTAATGGCATGCT
CTTATAGGAATTGACATGGCATGCTAAAGACAACTAGATAACTTCTTACACATGTAATTA
AATATGTGACAAAAGTGGTTCTTTCTTTATTAAACTCCTTCTCCAATCAAACACCATCATA
TAAAGTGAAACCAAACAGAGGGAGTAATTATCAACTGAAAGAAGACTAAAGATCCAAAC
CTTTGATATGTCCCCTCTATCCTGTTGTACAACAAAAGGCTCAATAACAGAAGCAACTGT
TAAAACCAAGAAGTGACCTCCAAAAGAGTGCAACTTGCTTTCACCTTGAATCTGCTTAG
ACACTGAAGCATTAACAAAGGAACTGGGCAAAAGCATCCCAGATGCTGATAGTGTCGTC
TTCCCAGAACTACACCACAAAATTACAACCCAAATTTAAAACTTTCAGTTCAAAACACAT
AACATAAACAACTATAATATAGAGACAGAGAGAGCTATGTAAAATCACTTACTTGTACAG
GTGGAAAGCATGTTTTCGCATTTTTAGGCCTTTAGGGTCCTTCAAGAAGAAGAATTTATT
TGTATTTTTTCAAAAATTAATTAGTAGAATAAGCAAAGTGATTGAAAATTACAGTATCTTG
GCTTAAGAAAAGGGACTCACTGGGCCTTGAATTCTGACCATGACGGCATAATTGCGGG
CAACATCAACCACTTCAGGAAGACCCAT
SEQ 71
ATGGATAACCCATCGGAGGATTCCTCGGATTCTCCTCAACAGCAGCCCGAATCTCCTGT
AAACGATGACCAACGTGTTTATTTAGTTCCTTACAGGTAAAATCTCCCTTCCCCGTTTTG
ACCCATTCCTCATGCAACTGTTTGTTTATGTATATCAACATAAAAGTAAAAATAAATAAAA
ATAAAGAATTGAATTCTCGGATTTTGCTTTCCCAATTGATTTTATGATTTGGTTTGATCCA
ATTCAGCTAAACCCGAATCTGAACCCATGAGATAACGAGAAAGTCGAAACAAGTTCTAG
TTTTTTTTTTCTTTTTTCTTTTTGTTTAAATTACTTATATTTTTATTTGTATTACTTGTCATTT
AGATTGGTAATTGTATTAGCTTCCCTACATTGGAATGTTGTAGTTTTTTTAATCAAGTCTT
ATTATCTGGATCAAATCGTGTTGTGAGTTTTTTTATTTTTTTTATTAGTTGCCATTTGGATT
GGTAATTGTATTAGCTTTTGTACATTGAACTAGTGTTGGTTTTTAATCAATGTTGTTGGTT
TTTGTTATCTGTTAACCGGTGGATCAAATCATGTTGTGGGTTGTATATTTTTGTTTTGTGA
GCTTAAGCATAAGAAAGTATCGGCCTTGGATTTTCAGTTGTGTTTTTTTGATGAAGTAAA
TAGTTTCACCAATGTCATCAAGAAGATGCAAGTATTACGAAAGATTAGGCCAGAGAGTA
TCAGCTTCAATTACATTGGTCTAGATTGCTAAGGAGCTGATAAAGTCCAGAAAGTTAACA
GGGTAAGTTACAATAGATAGTTTTGCCAACTAAATAAAAGTAAAAGACACCTAGCTATCA
GTTGTTAACAATGGAGAAGTAGTATAGCAAAGTGCCGGCAAGATCTGAAAGTGGTGGTT
ATAGGGACCTGTTTAATAACTTAGTAAACCTTAGAAGAAGCTGACAAATTGTTCCATCTA
CAATTTGTCAACCTTAATAGAGGTGCACACAAGCTGGTCGGACACCACGGTTATCAAAT
TTTTTGTTTAAAAAATGTTCCATCTCGATAAAATATCAATTGATTATGCATTATGTTGTCA
GTTCAAATATTGTTTCTCGCAATTATTATAAAAAGTGCATATCTGTGGAGAAGTGCTCCG
CGGGCTAGTGCGGTGGTAGGGGAGAGTGGTAAAAATGACACAAATGATGCTTTCCACT
TGCTAGTGGTTGTTAAGAAGAGAGAGAATGTTTGAGCGGGAAGGACGGGGTAAATAGC
ATGGAAATGTTAATTGAAAGAAGTTAAAAGTTACCCTTTGCAGCATCTTCTCTAGGTAAG
AATTTTTTGTCTGTGTTTTCCCGAGTAGAGGGTTAAAGTGTTGCACACACATATATTACA
GGTGCCACAGACACGTATATGTTTAGAGTACTATATAAGAAAGCGTGTTTGTGTTCTAG
GTGGTGGAAAGAAGCACAGGAGTCATCACCATCAGATGGGAAGTCAGTGACTTTGTAC
GCAGCGGCACCAGCTCCATCTTATGGAGGGCCAATGAAAATCATTAACAACATATTTAG
CCCAGACGTCGCATTTAACTTGAGGAGAGAGGAGGAATCTTTATCACAGAGTCAGGAG
AATGGTGAAGTTGGGGTATCTGGTCGGGACTATGCTTTGGTCCCTGGCGACATTTGGC
TGCAGGCACTCAAATGGTCAGTATTTTAGAGCAGTTTCCAATTTGTATTCCTTGAAGTGT
GTTAGATAAAGCCTCTTCTGACGGAGATTTACGCCATAGTTGTTGAGCATTCTGAGGAT
ACCATTTGCATATGTGTTTTTCTCGACTTCAAATAAAACATTGATTTTTCACTTCTGGTTA
CAACAACCACTTGCAATTTGTTGTTTGGTTTCTTCTGCTTTTCAGACCATTCACATTTTCA
TTTCACATGAAAGAGGCCTCAAGCCTTTCGAGGCTTCATTGTTGTTGCTAGTCCGATGG
CAATTCCCAGTTATAAATATATATTGTTAAATGCCTTGTGAATGCATATGGAAGCTCGTTT
TTTAAAGCATTTTGAGATTTCATTCTAAAAAGACCACTGTTTATTCTTTCAGCTTTAAAGT
GCTAAGCTCAATCTATTAATTCGCTTCCTTATTTTCTTTGTCTCTTTCATATATTTTTTTTG
TGTGTGTGGGGGGTGGGGATTGGTGTTAACTTATAACTGATTATTTCACTTTCCTTTTTG
GTGTTTTTGCACATCTAAGAAAGGGAATTTGTCTTTTGATCCTAGTAACATGTTATTTAG
CACGTTAATTTCATACATCTGGCACTATGTAAAAGTTGATCTTTTGATTATAGAGTTCTGA
TTAGTTTGATTGGAATTGCTCCTTTCCATCCAGGCACAGTAACTCTAAAGCTGCGGCTA
AGAATGGAAAAAGCTTTTNCAAAATTGCTCCTTTCCATCCAGGCACAGTAACTCTAAAGC
TGCGGCTAAGAATGGAAAAAGCTTTTCAGCTACAGATGAGGATATTGCAGATGTCTATC
CTTTACAGCTGAGGCTTTCTGTTTTGCGGGAAACCAGTTCCTTGGGAGTCAGGATAAGC
AAAAAGGTTAATAATAACTTTGGAATTTCTAGTTTCATCTACAATTCCCATGAGATTTGTA
CTGTCATAATATCCATAGAGTGCATAACCACATGTGATCTTTTTGGTACAGACCTTGCCA
CAATTTGTGAAGCTGACTTTCTTTTTCATCAGCTGCTTTGCCATCTTTCATCCTTCACTTT
TGTTGTTGCTGTTTATTGTTGAAACTGAAGGATCTAAGATGGACAAGTCCAAAATATCAA
CTTTAAGAACAAGGGTTATGCATGAAGCCCTCTATTCTCATCCTCATATTAATTACTCGG
AATGGGCATAGCTGTTAAGTGCTTCCATTTTTGTTTGATATTTAAATATTAACAGTAAGAG
CTTTTTATGGTTCTGGGTTGTGCAAAAAGAGGACAAGTATGTTAGCTGGATACGTATCTT
TTTGCTGACAAAGTGGGATAAATTTTGCATGGTAATTTTTGGCTTTACATGAATTTGTTG
ACAAGGATATCAATCCTATTGATATTTATGTAATTCACTTGAAGCATTTAATACTTCTATT
TCCCAATTACAGAATTGCTCATCAGCAATTTTTGACCACAGTGAGTTCTAGAGAAGCGA
GTCTTTTGAAAATGATAGTAGAAAGAGCGCTTCCTTTCTCTAGATTGTCTTTCTAGCAAA
GTAAATTAATCTAGAGTTAAATTGTATTGACAGGAATAAACAATATAAGCGGTATTTTCAT
CCAGACACCCCTCCCCTGTTTGTGGAGCAGAAAGAAACTATGTAATTGGGAATCACTTA
GTTTTGAGATAACATAGTAGACTATGTGACAGTTTTATTCTTTTAATTTAAAACTAACAAG
TTGTCTTATATCTAAAGTTTTAGCAGAATCATTTATTCTGCCTCTAATAGCTTGGAAGAAC
TATATATCATTTGAGGTCTTTACTTGCCGAAAGACATCGGAGATGAAGTTAGTTTTTTATT
AGATCAGATATGAAATTAGTTCTAGCTTTTTTTTATATACTCAAGGATGCCCTGACTTCCT
CCATCTTTATCTATTTTTGAGAAATTCTCTTTCTTGACTGCCAAATGCTAAGAGGAAATG
GTACCAAGCGGTTACATGCAAACCCTGGTCTGAAGAAGTAAAATAGCTAGAGTTCTAAT
TTTCATAAAGCTAATAGGAAATAATTTGATCACTTGTGAAAATAAGCCAAAAGAATGATG
CTCATTCGAACAAAGTTCTCTTAGAGTTACTACATATTTCGTTGTGTATACATGATCCTTC
AATGCTACTTCATATTTATTATTTACCCGAAAGTTGATGTTAATTTGAGCTCTTTTTTTCTT
AACAATGTTATTGCTGACTTGTCCGTTTACTGCCTCAGCTTGTGTACATAAAAATGTAGT
TTCCAAAATGTTGTTTGTATTTTGTAACTGTTGCATGTTAAACATTTGCAATATTGCGGTG
GACAACGTTTCTTTTTTTTTTTCTTGCAATAATATCCTCACCGATGTTCTTTTTTTTTTTTT
AACTATCCTCACCGATGCTTTGGAGTCAGTTAAGCTGCTTTATTTCCTTTAGAGTCTAGT
TTTACATTTGTCTTCTCACATTTGATTCAGGACAATACAGTTGAATGCTTTAAAAGAGCCT
GCAGAATTTTTAGTGTCGATACAGAACCCGTAAGTTTCAATACTGTTGTTAATCAATTGC
AATGGTATCTCTTTCAGGAGATTAATGGTATTTTGGTTCTCTGCAGTTACGGATTTGGGA
TTTATCTGGGCAGACGGCATTGTTTTTTTCAGATGAAAACAATAAGATCCTCAAAGACTC
TCAGAAACAGTCAGAGCAAGATGTATGTACTTTCAACTGTGTCATACTTCATGACTAACC
AATAAACAAGTCGACCAATGCTTCTGCGGCATTCACTATTTTTCCTGTCTTTACTAAGGA
AATAATTTAGTTATGCTTTTTTCTAATTGTTTTCTAATTAAGTGTTTTTAGCAGATTTTTCC
ATTTCTTTATCTAGTGTTTGTGTCGTAAAAAGATATATAATGATTGAGGTGATGAATATGC
TTACTTAACACTTCATCTAGGAATGAAGTGAGACAATGATTTTTCTCCATTTTCTATATAA
GTGTTGTTTTTTCTTGAGCATGGACAATGCTAAGCCCACCAAAATTCAGTTTTATGCGAC
TCTCTTTCATTTTAGGGTTCGTTCTGGAGTTATTCATTTATAAGCAGTAGATGTGCTCTTT
CCTTGTACTTTCAATGATGTACACTCTAAGAAACTTTAGCTCTTTTATTACCCTGGGACA
AAAGAAACACATAATAAACGGGACTGTCATGTCTAACGACCAGCTTATACACCCATTCG
TCTTGGAGAACAGGCGGGTAAATTCAGCTTAGTTATGCTGTTTTTCAGCTGGATCTAAG
ATTACAAAAAGAGCAACTGTTTTGTTTTTTGTTTTTTTCCATTTGTGGCAGTTATTACCGG
TGTGGTTCATCATTGATTGTTTTTGTATTTTCTTAGGCTGTTTATCTGTGAAACAAATTGA
AAGAGATGCCAAAGTTTTATCTGTTTTATGTTTCTTTTTTCCTTGTGGGTTACCATTTAAC
TGAGAGCAAGGTAAACCTTTACTGTTGAAGGCATTTTGCTGGTTATGGGTTGCCTTATA
GTCTTATTACTGACTCTTGAATTAACTCTAGAATTTAGTGTTTAATGGTTCGCACCGCTT
GTAAGCAAGAAATGATTTGGACAAACTTCTTATTTTGTCCTCTTATGTTTTTGCTTGCAGA
TGCTCTTGGAGTTGCAGGTCTATGGGTTATCAGATTCTGTTAAAAATAAAGTGAAAAAAG
ATGAGATGTCAATGCAATACCCTAATGGTTCTTCTTTTCTGATGAATGGTACTGGCAGTG
GTATAACCTCTAATCTCACTAGGAGCAGTTCTTCATCATTTTCTGGAGGTCCATGTGAAG
CTGGTACCTTGGGCTTGACTGGATTGCAAAACCTAGGGAACACCTGTTTCATGAACAGT
GCTCTTCAGTGCCTTGCACATACGCCAAAGCTTGTTGATTACTTTCTCGGGGACTACAA
GAGAGAAATAAATCATGATAACCCTTTGGGAATGAATGTAAGCAATCTTGAATATTTCAA
GATCATTACGTGCTGCTTTAGATGTTTTCTTCAGTTCTCTCTGAATAAGTCAATGTTGAC
ATCCCTTAACCTATTCTACATTATATGTGGTTGGAAAAGTAAAAGAAAAAGAGAAATTCA
TTTGATTACTCTCCAGGTGAGGAATTCTTTATTTACCTCCAATTGTTTTGTTAGCCCGGA
CAAAAGAAAACGATATGCTTATCCGTTCCATTCAATTTAGTAGGGGTTGAGAAAATTGAC
TCGGAGGGTATTCAATATCTCCACTTTTTGTTTCGTACCAAACAAGGGGAATAAACTTTA
CCTCTTTTACTTTTCCTCCTCCTTCCACCTCATCTCATCCCAATCAAACATTGTGTTCTAA
TCTGTCTCCTTACATATTTTATTGTCTAAGTTCCTCTCTTTAAATTCTTTCAGGGTGAAAT
TGCATCTGCTTTTGGTGACCTTTTGAAGAAATTATGGGCTCCTGGAGCGACTCCTGTGG
CACCTAGAACATTCAAATTAAAGCTTGCTCATTTTGCTCCTCAATTCAGCGGCTTTAATC
AGCATGATTCTCAGGTCCTTTCAGTCCTTCCTGTTGGATTTAGTTTCCCAGTTTTAGGTC
ACTTATTAACGCTCTCTTTTCTGTCCTCTCATTTTGTGGGCATCTTTTGACATCTAATTCT
CCTATTTATATCTGCAGGAGCTCCTAGCTTTTCTATTGGATGGACTCCACGAAGATTTGA
ACCGTGTCAAGAATAAACCTTATGTTGAAGCTAAGGATGGAGATGATCGTCCAGATGAA
GAAATTGCTGATGAATACTGGAATAATCATCTGGCTCGTAATGATTCCATCATAGTGGAC
GTTTGCCAGGTAAGTAACATCCGATGGTCTCTTGTATCTCACTAGAAGTAGGAAACATTT
GATATCACCGGCACTCAGTGGTCTCTCGTCTCTCACAGGCAAATGTGAATTATTGATCT
CATTTCAACATTGACTTGAAAAAGCAAGAAGAATGAAGTGGCATATTTTTTAAAAATATCT
GAACTCTACTGTATTTGTGCTGCGAGAGTTGTTCTAGGATGAGAGAGTAATTATACCCC
AACTGTTTGGGGAAGTTTAACCAGTGTTCCTAAAGCTTGCTTCAAATTTCTCAGATATTT
TTGTCTAGATTCTCTGCCTTTTTCATCAATAAGATTTCTTACCTTACTCAAAAGAAATTGT
AAGTAATGGAAATTGAATTCAACTCTTACCATAAGTAATGGAAATTGAATTAGTCGTCCC
TTTCAAATCAATCCGATAACCAACTTGGTTCAATAATTCGGAATAGTGGGAGTACTATTT
GTTAACAACTGACATACTATTTTCCTAGAATGCAGTCCTGAACTAAGAGCTGAATTTTGG
ATTCAGGTTTATTTTAAAACAAATTAGTTTTATTTGTAGTGCTCCCTGTTTTCTCTATATG
GTCTCCGCATTTTATCTTTGATGTCTTTTTGAGTTTTACTGAAATTTCCTAAAAGAAGAAG
AATATTCCAGCCTTTAATCTCCATAAGAAAGTTAAATTTTTGTTCTTCCATAGTTTACAAG
TTTAATTATATAAAAACTTGAACCTACCTTATCAAAAAAGAAAAAGAATTATGTGAAAACC
TTGAACATTGTGAATGTTTCTGACATTTGTGCACTCTATAGGTGTGTTTGGAAGTAATTG
GTCTTTTTATGTGTTATGTAGTCTATGGCGGTATGTAATTTCTAAATTCCTCTTTGGCCAA
TCATCTGTGAGATAAAGCTCTGCAATTCTAAGATAATTTCGAATACCACCAATTGATGAT
AGCTTGTCATTTTTTTTAGTTTTTTTATTCTGTAATTTTTTGCATTAATAAAGTTGACTCTT
AGCCATGTCTATCATTAGATGTCGTAAATTTTGAAATTTCACTTTAGAAACCATGTACATA
GTACATGTTTCCTAGCAGGTCGTGATTTGTCTATGACTTTTAGGAGGATTTAAAAGTTTA
CTTCATCTGACTCCCTTTTTCTGCACATTTATACAAGTTTCTTTTCTAGTCTTGCTTCTCA
GAGCTTATCTCGATTGTTGCAGGGTCAATATCGTTCCACATTGGTCTGTCCTGTTTGCA
AAAAGGTCTCCATCATGTTTGATCCTTTCATGTATTTGTCACTGCCTCTTCCATCTACAT
CTATGAGGTCAATGACTGTCACAGTTATAAAAAATGGCAGTGATATTCAGATATCTGCCT
TTACAATCACTGTTTCCAAGGATGGAAGACTTGAAGATCTTATTCGTGCTTTAAGCACTG
CATGCTCTTTGGACGCTGATGAGACCCTTTTGGTGGCTGAGGTAAAGTGCAGAATTTCC
AGTGATGAGAAATGGTTATGGATTTCAAGTTGTTGCTTTATTGTTTCCTAAATAGAACTTA
TTACATACTGTGTATTGGATAGTCAAGTAGAGTCCTTTTTCCTATTTCCAAAATTTTATTT
CCAGCTCTTGCTGGGTTGTTGTTGTTGTATTTCCAGCTCTTACTCCATTTAATGTTACAG
ATATACAACAACCGCATTATACGTTATCTTGAGGAGCCAGCCGATTCATTATCCTTAATA
AGAGATGGTGACCGACTTGTTGCTTATCGGTTGCACAAGGGTACTGAAGAAGCCCCCT
TGGTTGTGTTTACGCATCAACAGATTGATGAGTATGTCTTGACTTCATAATTTGGGCATT
ATCTTTTTTTGCTTTAAAGTTCATCAAACATTACTAGCCATTACTCAGATGTGTCTTGCAT
GCACAGCTATGTTTCATAAGTAATAAGTTGGGGGAAAAAGTACTCCAAGGGTGGTGCTT
CCACATCATCACTCTTAATCATGGCAGGGTTTGGATGTGGGCGTACTTGATGACTACAT
TGCTTAAAAGAATTGACAAAATATTTTCGCAGATGACATATGTAGTAATATCTCAGTCTAT
TAGTTTGCTTTATGGAGATCGGGTGATTAATTCATGATCGACACAACTCCAGTTAGTTAA
TAGAGTAGGCTGTTAGTTGTCATATACTTCTATCTTGTATAAAGTAAAAATGTGAGGTGG
TTTATTTAGTACTGTTGAGCATCCTCAGTCTCAATTCGCTTCACTTGAATACATTACAAAT
CATTGTTATGCATGGTTCGTCGAGCAACATGTAGTTCAGATGATGTGTGTGATCCTTCTA
GATTATTTGGACAATCATGAAACTATTGCTTCTTCCATGCATCTTACTGCTGAAGCTGTA
TATGATATGGAATTTCATGCTGTTTTGTTTGCTGATTATGTTTAGTTTAACTTTTGATCCA
TTGAAAGATTCTCATAGTGGTCCTTGACTCATTAAATGAGATGGCTGATATTTATTTTGG
CAAAATATCATTTCCTTCTTGATTTCCTCTTCCATTCTAGCAATCTTATGAAGACTGCATG
TGCAGGCATTATATATACGGAAAGCTGACCTCAAACATGAAGACATTTGGCATTCCGCT
TGCCGCGCATAGTAGAGTTCTTACAGGATCTGATATCCGTAGTCTTTATCTACAGATACT
TACACCATTCTTAGTCCACAATACAGCCCAAGCAGATAATCTTAACTGTGATAGAAGTGC
TACTGAAGCATGTACAGATTCAGAAGTCATCACAGACATGGAACCTGGCAACTCAATAG
TAAACGGGGTTCCAGAAAGCATTGCTGAAGAAGATACTGCCGAACCTTTAGACATGGAA
TTTCAATTTTACCTATCAGATGATAAGGCAACCTTTAAAGGCTCCGAGATTGTAATGAAT
GAGCCATTACAGTCCACAGATATCTCTGGACGGTTAAATGTACTTGTAAGTTGGTCACC
TAAAATTCTTGAACAGTACAATACAGGCCTTTTCAGCTCACTGCCAGAAGTTTTTAAATC
TGGTTTTTTTGCCAAAAGACCACAAGAATCTGTCTCTCTGTATAAATGTCTTGAGGCATT
TCTGAAGGAAGAGCCTCTAGGGCCAGAAGATATGTGGTAAGTATGCAACTCCCTCACTT
CTGTGATTGTACACCATTCATATGCAAGCTATGTATTCATAACATATGAAATTTCTCGTAA
TGCTTCCCTTTTTGCTTCTTCTTTGGTTTGTGCTAATATTATAAACCCTCAACTTTTGTAA
TTACATAATTGTATTTTTCCAATTATACCATTTTATTTCATTTCTGTCAATATTTTCCACCG
CGTCGTGATTGCTTATTGTGGATAAACCATTCTTATTAGCCTCCCCTCAACCAAATTGGA
CCTTGACTTTGCAACATGGCATGAGTAGTATCCTTCCAACTTCTAGTTCAGTTATGTTAA
AGAAACAATGACAGCATCTGATGATCTTATGTAGCACCTATTGATTTTCTGCACATTGTG
CTTCTGAAATGCTTTATGTGTTGCTCTTTGTTTCTTGTATATTCATAGCAACTACAGACAG
TAATTGAGATAATAATATTCAGCTATTTACCTGGGGCCACTCATGGGAGGAAAGACTTCT
TTCATGAAATGTTTCTAGTATTCTATCTTATCATCTAATCATTTATTTGTGTCATTCGCTTG
GGAAGTATGAATATAATCTGCCTAACTTTCTTTGTCTTATATCCAACATTAGGTACTGCC
CTGCATGCAAGCAGCATCGCCAAGCTACTAAAAAGTTGGATCTTTGGAGACTGCCGGA
GATTCTGGTCATCCACCTGAAGAGGTTCTCGTACAACCGGTTTCTGAAGAACAAGTTGG
AGACGTATGTTGACTTCCCAACTCATGATCTTGATTTATCCTCATATTTGGCCTACAAGG
ATGGCAAATCTTCCTATCGGTATATGCTTTATGCAATTAGCAACCATTATGGAAGCATGG
GAGGGGGTCACTACACTGCGTTTGTTCATGTAAGTGGTGCTGCGACTTGGATTACCTTG
CTTCTTTTTCTTGGTTTTGTTTCTATTCTATGGTAAATAGGATTCTTTTATACCTGATAAAA
ATGGCATCTTAAGATCAGTACTTGGGGAGAAGGGTGGGTGGTGGGCGGTCACTGAAAC
CTACCTCCAAGGGCAAATATAGAAATTTCCTCTATTGGTCTTATTCTTATTGTTCGTAGT
GAGTGTTCCTTTGATGTATTTTTTAGTTCCAATGCATCATCTGCATCTAAATTAATCACAT
ATTGCACACATGTGCATCTATTATATATTTAACTTTGGTCATGCGTCTTCATTTTTTTTATT
TCTTCATCATGAAGAATATGCAAGAAGGTCAAATATTCAGACTTTTACAGTCTTCCTAGT
TTAATCCAGATATTCTAACTTTGTGTTTTTCTTCTTCTAATAATCTAGCAAGGTGCTGATC
GGTGGTATGACTTCGATGACAGCCATGTGTATTCCATCAGCCAGGACAAGCTCAAAACC
TCGGCCGCCTATGTTCTATTTTATAGACGAGTTGAAGAAATC
SEQ 72
TTACACTTGCCTACTACACTCTCCTTTGCCAAAACCTACTCGTCGATTTCTCATATCAAA
TTCTACCCATAAATTTTGCTGGTGAAAATTACCAATAATATTGCTTGCTATTCCAAGTGAT
TCTGACCGTCCGATTCCAACACAATGGATCCCACCTTCTACTTCATCCAACATCCTTTCC
TTATTGATCAAAATATCAACCCCGTTTTCAAATTGCAATGTCATATCACCTATCAACCGTC
CGATTTCGATCGGACGGTTATCGAAGCACATGTCGAGTGCACCACCATAAACGTAACCT
TTTTTCAATCTTGGACCTACTAACCTAACAATTTCTTCTCTGACCTTATTGTACGCTTCTT
CCACTAAGAAAGTGTACTCCGTGCCGGAATCAATGATCGTCTGGCCGGAACCACCAGC
GTTTGGCCGGAAAACCCTCCCGGAGATGTTTAATTTTTTGCCGCCAATTTTTATCCCCA
CCATGCCAACAGTAAAAGCTAGTGGATCCAAATTTGGCATGCGTTGACTTTGAGGAAAA
GTCAAAAGATTTATGTATTGAAATGTATGGGAATTAGGGTTTTGGCCTAGGTAAAATGTT
CCACTAGGTTTAACTGCATGGCTACCTTGTCTAATTGGCACGCAATATGAGAATTTTTGT
ACCTTAGCTTGGGAGGCAAAAGAAAACCGTCCAAGATTCATTCCCAAAATACCCTCAGC
ATCTTCGGACTCGGTCGCACAACCAAGAATCAAAGGAGGGGTACTTTGGGAACGTGAA
AATGTAATTTTTTCACGGACAAGATTACCCTCAGCTAAAGTACCATCAGCATAAAAGTAG
GAATAGTGGCACAAACGATTTTGGTCACAAGTAGTTGGAAGGGTAAAATCGGGAATTCT
TGGCTTACATAAAGGATGAGTACAAGGAAGAACAGAGAAAGTAGAAGACAAAGAAGGA
TCAAACGACGTCGTTGGTGGGGGTCTTTTGGGAATTTTCTTATGACATTGAATCCAAGA
AAGTTGGCTACCAGTGTCCAAAACCATTTGTTGATTTTGTGGTGGTGTTCCTATTGGTAG
TGTAACAATTAAAGCCATTGAATATTTAAAAGTTGATTTATAGTTCAAAGATGGAATTCTA
GACATAGTTTTTGTATTTTGAGTTTGTCTTCTATTATTAGAAGCCATAAAAGAAGAAAGAA
AAAGAGCTTTAGAAGAAGAGTTATGTGATAAAGATGTTGAAATAAGAGGAAATGACATA
GAAAAAGGCTTATGTTTAATGGTTTTTTGTGCTGAGATGTAGAGAAAATTGAAGATTATG
AGAAGAAGAAGAACAAAAACTCTAGAAGAAGAAGCCAT
SEQ 73
TACACTATAATTATATTTTCGTTAAATATGAAGATTTTTTCCATATTCTCTTTGCTTCTTCT
CCTTCTCCTTCCCATCTTGGCTTCATGTCATGAAAAACAGGTACAAGCATATACAATTCT
AGTTTCTCATTGATTCTTTAATCGCAGTTCTACTTCTGTTTATTCTTTGTTTTAATTATGGG
GTTTTGTTTTGCAGGTTTATATAGTGTATTTTGGAGGACATAAAGGGGAGAAAGCATTGC
ATGAGATTGAAGAAAACCATCACTCATATCTCATGTCAGTGAAGGAAAGTGAAGAAGAA
GCCAGATATTCTCTTATTTACAGTTACAAACATAGCATCAATGGCTTTGCTGCACTTCTC
ACCCCACATGAAGCCTCCAAGTTATCTGGTATAATAACCACGAAAAAAGTTCACTCTTTC
AAAGAAAGAGTTTAAGTTACATATAGTAAAATTTAATTGGTTATAGCAGGTTATTGCTCTA
TTTTCTAGGTCAGAGTAACTTGTTTTCATATGTCAAATTAATCTGATAGTGTAAAAAATCC
TGTATAAGAAACACAAGGTTCTTGTATGTAGAAGAACTTACCTTATGTATTATTTGAACA
CAGAATTGGAAGAAGTGGTATCGGTGTATAAAAGTGAGCCAAGGAAATACAGATTGCAA
ACAACAAGGTCATGGGAATTTTCTGGAGTGGAAGAGTCAGTGCAACCAAATTCCTTGAA
CAAGGATAACTTGCTACTGAAAGCCAGATATGGCAAAGATGTCATTATTGGCGTTCTTG
ACAGCGGTACATACATATATATTTGCTTACCATTATTTCCAATATGGCATTATTTTCCCTT
TGTTTTAAATTTTAAATGTATTTCCACAAAGGGCTACATAATCTAGCATGTGATTATCGTT
TCTCCAATAGTGATACAGACAATCTTATTAGTAAGACTAATGCCTTGTATGTATAATAGTA
GAAAGGGATAACACGTGAGGAATCAACCTATATATATATATATATATATATATATAAATGT
ATTTCAAAAAATACTACTTATAGACATATAAGGAAAATTGTGAGAAGCCTTGTACCAAAG
GGAGTCTAAAGTTAAAATAAAAATTCAACATGTTTAAGGATTATGGTTATATAGGATGGA
CGTGTAACTGTGTCTATCCTCCGGCTTATCACTGGCAACTGAACACGAGGGTTGCGCT
CGTTGCGGGACTCATTAATTATGAGATTATCAACTGTAACTAGTGTTAATTGACTAGTCT
GATACTTAAAAAAAAATTGGAGTATGATATTATGTGATGAATGTTGTTGGATGATTTACC
AGGGCTATGGCCAGAATCTAAGAGCTTTAGTGATGAAGGGTTGGGACCGATTCCAAAG
TCATGGAAAGGAATCTGCCAATCTGGAGATGCTTTCAACTCTTCAAACTGTAATAAGTGA
GTGTAATTCCTCTTCCATATGTTTTATATCTTTCCTTTAACTTTTTCTTTCTTTCTTTATCTT
ATCCCTTTTTATTATCTCGATGATCTGATGTCTACCTGTTTTACAATGATTTAATGTGGAT
TTTAGCCATTCTTGGGTTAGAAAATGTTCAGCTGCTCTACAACCCTAGACCACATTCTTT
TTGTTTTGGGAATTCCTGCTAAAATAAGCTGATTTACTACCTTAGACGTTTGGTTTATCAA
ATATACCAACCTATACGTATTTCTTTATTTTTCTTTTTTTAATAAACTTTATTAAATTTTATA
AGGCTGAGATGACTTTGAACGAAAAATATGATTCATTTAGTTTAAATCCAACTTATTTGG
AACTGGCATAATAGTTGTTGTTGCTATTAAATTTCATAAGTAGGCTTAATAAACATGTCAT
CAAGTTTTGTGCGCACCTATCATATGATGCCTTGTTTATCCAATTATGGATTTCAGGATT
TGCTTGGAAATGAAGTGTTTGGCACTTATCTCTTGTCTCTTATACATTGATCTAACTTCG
TAAGATTAATTGTATTTAAATGGCTTGTAATAGAAAAGGCCAAAGGTCAATTTCAAGGCC
GATTTTTGGAAGTTTTCCTTTGTCTTCTTTATCAGTTGACCCTAAACCATTCTCATAATTT
AGCTTAATTAAAATCAATTAAAAGAAAGCAGATACATGTTTAGTTTTTTAATCTTGTACCT
CTCTAAAGAGTGAAAGAGAGTTTTTTTGAGAGGACAGGACCCATTGGGTGTCCATGCCT
GTCCTTTGGTGGCCTTAGGATATCAGTGTAATAATTTCAATATTGTCCATTTCAATCAAA
CCAAGAGAGGTTATGCTGACAAGTTGCTAATTGTTTTTTGGATTCTTGCTTTGCCATCTT
GTGAACTTTGTATCCTTCCAATGCTTTGTTGTGCAGTAATTTGTTTTTTGCATGTGTGTTG
TCATTATGGTTATTGTGAAGTCTATAGTGAAATTTTGTGAGGCCCTTACTTCCAGTTTTG
CACGGATATTCTCAGTAGTAGCCAGTAATATTATCCATTTTGACTATCTCATGACTTCCA
TGCAGCAGCTTTTTGACCTTTAGAAAGTTGATGATGAAATTCTACCATTTTAGAATGATA
AGTCATTTTCTAGCTGTTAAGTCACAAAAAGAGCACTAGAGCAGTAAAACTTTTGAAGTT
TCATTGTGAGGTTGGGAGGAGTGGGCCTGATTATCACATTCTTGTCCTAATTTGTTACT
GCTACTATCCTTTTTTTTTTTTCTTATTAAGAAGAAGAAAGCCTTTTCTTCCCTTCTTTTCA
AAGGGTAGGGGGTGGGTGGAATATATTAGCCTAATTTGTCATATTTTCCTTCTCGTATAT
AACCATGCTACTATATATGTTGTACTCAAAATATAAGATTTTGTATACCTTTTCCTCTATA
TACTAGATAGTGTGATCCCCTCATGCATCATCTTCTTTTCTCTAGAAGAAAATGTTTTATT
CATGGTGACAGGGGAGGGAGAGGGTGGGAATGTTGGGATCATATCTTGATATCTTGTC
TAATTGATCATCTCAGGCAAATTTAGGGTGGTCATGTGAGTTAAACTAAATAATTTTATTT
CATAGGATCAGCCCGCCCTGATCAAGAATTACTTACTAGCTAGCCAGACTAGTGGAGC
CCTAGCCGGAGACATTCTCTAAATCATGCCTTAACGCGCCCATCTTCCAAATAAAAAAG
GGCTAGTTAGTAAGAAAGATGGAAAGACCTTTATCCATAATTCTTTCCCAGTCTACCTCC
TTCCTTAATTGTGACATGTCCCGTTGATCCCACCTACGAGCTATCTGTCTTTGCCTAGCA
AGATAATTTTTGGTCTCCTATTCTTGCCTATTTTTATAGCCTGTCTTTATCAAGCGAGATA
ATTCTAGTTCTTTTATTTTTGCCTATCATGGTAGGAAATTGGTTCGGCTTGATTGAAATTT
TTTAAAATGTTTACATATAAAAAGAGTACACGCATTCTGAACCCACCAACTCTAAATCCT
GAACTTGCTTCTCCTAATTATGTAAGATAACTTTAATATTTATTCTCCTATGCTACTTTGG
GACTTCTATTGCAGGAAAATAATTGGAGCTAGGTACTACATCAAAGGTTACGAGCAATA
TTATGGCCCTCTAAACCGAACTCTAGATTATCTATCTCCACGAGACAAGGATGGACATG
GAACTCATACATCATCAACAGCAGGAGGCAGAAAGGTTCCAAATGTCTCTGCCATTGGT
GGCTTTGCATCTGGCACCGCCTCGGGTGGCGCGCCACTCGCACGGCTAGCAATGTAC
AAAGTCTGCTGGGCTATTCCGAAGGAGGGCAAAGAAGATGGAAACACTTGCTTTGACG
AAGATATGTTAGCAGCAATGGATGATGCTATTGCAGATGGTGTTGATGTTATTAGCATTT
CTATTGGAACAAAAGAACCTCAGCCTTTTGATCAAGATAGCATTGCTATTGGAGCACTTT
ATGCTGTGAAGAAAAACATTGTTGTGTCTTGTAGTGCAGGGAATTCAGGACCTGCACCT
TCTACATTGTCTAACACAGCTCCCTGGATTATCACTGTTGGTGCTAGCAGTGTTGACAG
AGCATTCTTGTCACCTGTTATCCTAGGAAATGGCAAGAAATTTACGGTAACACGATAATC
TATTCATTTTCTGTACACTATTTCATCTAAAATGTTGTAACACTAGGATCATAACGTTTTC
CTTTATCTATTTAATTACATTCATATTGGAATGAAATTGAATCCATTTTTCGTTTGCTTAAT
ATCAGGGACAAACAGTTACACCTTACAAGCTCGAGAAGGAGATGTACCCTCTAGTTTAT
GCAGGACAAGTAATCAACTCTAACGTAACCAAAGATGTAGCAGGGTACTCTCCTTGCCT
CAAAGTTTCAATATTTTTAATTAATAATCATAATTTTCTTTTGGTTGATTATGTTAAACACT
ATCTGAAACTTTTTCAAAAAAAAAATTCAGGCAATGTTTACCAGGTTCCCTTTCGCCGAA
AAAGGCCAAGGGGAAGATAGTAATATGCTTGAGAGGGAACGGGACAAGAGTAGGAAAA
GGTGGAGAGGTGAAAAGGGCAGGAGGAATTGGTTACATACTAGGAAATAATAAAGCAA
ATGGAGCTGAATTAGTAGCTGATCCTCACTTTCTTCCAGCCACTGCAGTGGACTATAAA
AGTGCAATGCAGATTCTCAACTACATCAATTCTACAAAGTCCCCAGTGGCATATATTGTC
CCAGCTAAAACAGTTTTGCATTCTAAACCAGCACCTTACATGGCTTCCTTCACTAGTAGA
GGTCCAAGTGCAGTTGCACCTGATATCCTCAAGGTCAGAATTTACATAACAAACTTAAG
ATATTTACCTGACTTATGATTTATGCTTCCTCATCTAAATTAAATTCTGATTTTCGCTACTT
CCACAGCCTGATATCACCGCACCAGGGCTGAATATATTGGCAGCATGGAGTGGCGGAT
CTTCCCCAACGAAACTAGATATCGATGATCGTGTGGTTGAGTATAACATAATCTCAGGT
ACTTCCATGTCTTGCCCACATGTCGGTGGCGCCGCTGCACTTTTGAAGGCTATACATCC
CACTTGGAGCAGTGCTGCAATAAGATCTGCTCTTATAACCTCAGGTACCTCTCAACTAC
TTTTGAACTTAACTTATATACACTAACTACAGTATTTTAACCTGTTATAACATATATAGTTA
TTTTGCTGCAGGTGACCTGATAGTGTGTAAACATTATTTTACATTGTCGGTGTATAGAAT
TTAAACTCCTTTTTCGTCCAAAATTTTGTATTTTGAACTGATCAATCGTTATATTTTCAGCT
GGATTACGAAATAATGTTGGTGAGCAAATAACGGATGCATCAGGGAAGCCAGCAGATC
CATTCCAATTCGGAGGAGGGCATTTCAGGCCATCAAAGGCAGCAGATCCTGGACTTGT
CTACGATGCTTCCTACCAAGACTATCTTCTCTTCCTTTGCGCTTCTGGTATTAAGGATCT
TGACAAATCCTTCAAGTGTCCCAAGAAATCACATTTACCTAACAACCTAAATTATCCATC
TCTGGCTATTCCCAATCTCAATGGTACTGTTACTGTTAGCAGAAGGTTGACAAATGTTG
GTGCACCAAAGAGTGTTTACTTTGCCAGTGCTAAACCTCCATTGGGATTCTCTGTTGAG
ATTTCTCCTCCCGTCTTGTCTTTTAAGCACGTTGGTTCGAAGAGGACGTTCACTATTACA
GTGAAAGTTCGAAGTGATATGATTGACAGTATTCCGAAAGATCAGTATGTGTTTGGATG
GTATTCCTGGAATGATGGAATCCATAATGTTAGGAGTCCAATTGCAGTCAAATTGGCA
SEQ 74
ATGGCAACACGTAGAAGCTCTAGCTCTGCTCTCACGGCCCTTGCGGCGTCTCGTTCCC
GCCTACTCTCGCGGTTTCGTCCTGCAGTTTCTCGTCTCTCTCAGAATACTTTACTCGGC
ACCGGCAGGTGTCCACCTCCCAATAGTGGATTTTTTGTTGCAGAAACAACTGCTGCACT
TTGGCCGAATTATAACGTGTTGTCCAAAAGTTTCGTGCACTCTTACTCTACTACTGCTGC
TAGCTCCGGACAGGCACGACTTTCTTCTTCCTAATTGCATTCTTCTCTGTTCAACGACTT
TTCTTCTTCCTAATTGCATTATTCTGTCCGTTCAATTGGAAGTGCTAATAGAATTAACTCT
AATTGACGTTTAGATTAAACTTGAATGAATGCTGTTGGTTCTTTTATTTAGCTTTTGATGC
GAAGTGAAGTAATCTCTATTTAGATATTGTCAGTTAGAGAACTATTTTCTCAACGTTAAG
GAACATCATTTCCAGCCTTTTTTTTTTTTGCAGAGTGGAAGCCTTAAATTGTGTATTTTTG
GACGAGAAATAACAAAAATGGTCCCTTATATGTGGGGTAGAATAAAATAGTCCCTTAATA
TACTCCTGAGCAGTTTTGGTTCTTCAAGTTTGCAAAAAAGTGAGCAGTTTTAGTAGTCGT
CAATTATTTTAACAAACTCTGGTTGTTTAATTTGACGAATACGAAGTCGCATTTGGAGGT
GCATTTTTTGCCGTTTATGATATATTTGGTCTATTTCTGGTGTCTGATGGAGTTTCTGGG
ATTTAATGGGTCTTTCCTAGTGGTTCTAGTTAAATCCTTTTCTTTTTCATAGTTTCGCTAA
ATCTAGCAGCCAAATTTTGATAAACAGTTGACAAGATAAAAAATGCTCATGCGTGGCAAA
CATAGATCCTTCTGATAAGCGTCAAGCAGTGGAAAACACTTTTAGGTGCTGAAGTGGAT
TTTTATAAATTGGCAGTTACGTGTTAAGTGAGAAGTGGAACTGATAATCAATTAGTATGG
TTGGTAAAAAAACTGTTGATAAACACTTTTTTTGCTAAAATAACTGTAATGACCTTAAAGT
TATTTACAAATTCTATAATTTTAAAGTATTTATTACATAAAAAGACGAAAAATAGAGGTAAT
TAAAAGTTATGTTAGAAGAATATATTGGAGATTACAAAAGATCATAGGGATAAAATCGTA
AAAGGCTTGGTCAAACAAAAAATGTTTATAAGGTATAACTTTTGACTGATTTTGGCTTAC
AAGTTCTTCTCGTACGAGCACTTTTGATGTTTATCAAACGTGTAGATAAGCCAAAATGTG
CTTACAAGCTAGTAGGACCCTCTTATAGCTTAGACAAATACATGTATTTAAGAGTCTATT
TTATACCTACCTGGNNNNNNNNNNNNNNNNNNNNNNNNNNNNNNNNNNNNNNNNNNN
NNNNNNNNNNNNNNNNNNNNNNNNNNNNNNNNNNNNNNNNNNNNNNNNNNNNNNNN
NNNNNNNNNNNNNNNNNNNNNNNNNNNNNNNNNNNNNNNNNNNNNNNNNNNNNNNN
NNNNNNNNNNNNNNNNNNNNNNNNNNNNNNNNNNNNNNNNNNNNNNNNNNNNNNNN
NNNNNNNNNNNNNNNNNNNNNNNNNNNNNNNNNNNNNNNNNNNNNNNNNNNNNNNN
NNNNNNNNNNNNNNNNNNNNNNNNNNNNNNNNNNNNNNNNNNNNNNNNNNNNNNNN
NNNNNNNNNNNNNNNNNNNNNNNAAAAAAATAAAAGTTACTACTTTTGTCATTTTCTAAT
TGTTGGACAGGCGGTTTCATTCTACTATTTTTTGACAATTTCGTGGGTCATCCTTGGGGT
AGGGTAGGCTGCCTTCGTCACACACCCTTGGGGTGCGACCCTTTCTCGGGCCCTACAT
GAATGCACGATGTTTCGTGCACTGGACTTCCCTTTGTGGAGTACACTTTATCAAAGTTA
CGTATAAACACATGCACTAAACTAGACTTTTGTGATAGTTGTTTCACTTGAGGCTGTCAG
TTTACTTCTTTTTTTGTTTGGCTGCTATTGGTGTTGCCATAAAAACTACTCTAGAGTTTAC
TATTGATGCTTAGAACTTATGGGGTGAATGAAAGGACGGGTGACTGAAAGGACATCTCC
TTCCTCAAACGTGTTATATCTTCTTAAACAAGAAATTTTGATGTACTCAAACAATACTAAG
GGGGGTTGTGCAGATAAAAACAGCTATTTATAAAGGTCCATTGGTCTCCCTGGCCTTCT
CTAGAATGAGGAGTGCCATGATTGTAGATATTTACCTATACCATATCGCCATTTGTCAAT
TCTCTTGGATTTGTCCTGATGATTACTTATCTTTAATTTTGGGTAATTTTAAATTGTTTTG
GCATATTATTTGTTGTTATGTTAATTAGTATGAAGATTTAACAGATTAATAATATGGACTA
CACCGAGATGGCTCTTGAGGGTATTGTTGGTGCTGTAGAGGCGGCACGGACTAGCAAG
CAACAAGTAGTTGAGACTGAGCACTTAATGAAAGCTCTTTTGGAGCAGAAGGATGGGTT
GGCTCGAAGAATATTCACTAAGGCTGGGTTGGACAACTCATCAGTTCTGCAAGAAACAG
ATCAATTTATATCTCAGCAGCCAAAGGTATGAAAAATGGAGACTGATTGTGGATTCTGAT
GAGTTCTTGGACTAGAGAATCAGATATTTTTTCTTGCAGGTAGTAGGTGATACTAGTGG
CCCCATATTGGGGTCACATCTTAGTTCTCTCCTAGAGAATGCGAAGAAGCACAAGAAAG
AAATGGGAGATTCCTTTGTGTCTGTGGAGCATATGTTGTTATCTTTTTTGTCAGACACAA
GATTTGGTCAAAAGTTATTCAGGAATCTCCAGCTTACGGAGAAGGCTTTGAAGGATGCT
GTCAATGCTGTTCGTGGAAGTCAGAGAGTAACTGATCCAAGTATGTATATATTTATATAG
CTTCATGTTTCGTGGCCATGTCTCTTATGATTTCATTCGTTCTGGTTGAATGGTAAATCC
CAGTTGGCGAAAGGATCTTACTTTATCACAGCATGAGATGATCCTTACTTTGGTTGATTG
GGTGGATCGTGCAATATTGTCTCTCTGGTTTGTCATGGACATTAAATTTTTCCTATTGAT
GGGGTGGGGGGGGGAGTCTTGTAAGGTGGTTAGAGGCTTAGAGCTGATAATATTTCAA
AAAGTACTTGGCAAAAAAGGCTAATTCCAAGTAGATGGTATAATACTCCATTCACATGAA
CTTAGATTTAAATCTGAATTTGAAGAATGACTTTTGATATCAAAAGGTAGAATGAGGAAT
TAGCAAAATTGCATTGAGGGAGTATGGATGTCCTTGATATATATGACAATGCATATTACT
GTCTCTTAGTGACTACATCATGAAGTTTCAAAATGATTGACCATGCTCAGTGCAAATAAG
ATATCTAATTGTGTCAAAATAGATTTTAGTATGGCTCCGATATTTATCAAGATCTTCCAGC
GGCTCTTCCTGTCTAGGAATGAGTTTGAAATCTCGATCCTAAGGGTGTGAACATGTTTG
CAATCTGACACGTTTGTTTACTATAGTCGTCAAAAGCATGCTTTGTGAGATAGCAATGCC
TATCTTTGATTGTGCTACCTCAATCTCCTGTAATTTTCTCAAATCCTGAGCCTTACAGCA
ATTGAACAAGTGTTGCTAGAGTTAAGAAACTATTTGGTCATTGCCTTCTATAATAAAATG
TCATCAACATAGTCCACTAGTAAATACATTAACCACATTGTTGTGAAGAGCGTGAAGTGA
GAAAAAGCGACAACCCCCATTTCGCTTAAAGCGAGAAGCGTAGCACTCACTTTTTTGAA
GTGAAGCCGAATTTTCAAAAAAAAATTAAAATAAATACTGCATAGACAACACATGTAATT
GTAAGCAAATGTTCAATACTTCAATGTAAAAACTAAATAGTAGCATCAATTAAAGCACAA
AATGAGCATCCTATTCTTCTACAAGATTGTGAAATTCTTGTATTCCACTATCATTATTATA
TTGCTCGTCATCTTCTTCAACTTCTTCTTCTTCATCAACTAGGGACAAAGTAGCCGCCTC
TTTTCCCTTCCTCTGTGAACTTGAAGTTGAGGTACTCCCCTTCAAACCATAAATCCTCTC
CCCAATTTCACACGCCTCCGCAACATCACCCCAAGTGAAATCAGAAGTTTCCTCAAATA
CTTCTTCATCTGCATGATCTTCCGGGACTCCAATTAGCCATTCATTAGCATCATTGATGT
TGTCCAAACTAATTGGATCAATTACATTGCGAGCATTGTAACGACGCCTCAATGTTCTAT
TGTACTTAATGAAGACTAGATCATTGAGACGCTTCAAGGTTACTTTGTTCCTCTTTTTGG
TGTGGATCTGCAAATAATAAGTAATTAGTAAGATTAGGACAATTGAGATATAATTTAATTA
TCTCAATATACTAAATCTTTCTTCTTAGTTCTTACATGTTCAAACACGCTCCAATTCCTTT
CACACCCGGATGAACTACATATTAGACTTAGAACCTTAATGGCAAACTTTTGTAAATCTG
GGGTGAAATGGCCATATTGCTTTCACCATTCAACTGTAGAAGTAGAACAAATTTTCAAAA
CATAATATTGATAAATTAATAACTTATTAACTATAAAACAACATATAAGCACTCGTTCACC
TGGTGACTTCGTCTTTTTTTGTCTAATCGCCATGTTTTTTCCAAAAGTTGCTCAGCATTC
CTATAAATACTAAATTGCTCTGTTATTTTATCTTGCACGGATTCTTTGGGTATCAACTTCT
CAGTACATTCATAGTATCCATTCCACAAATGTTCATCTCCTAGAATCCTCTCTTCATTGTC
ATAAAACAGTTCCGGGTTCAAAATAAGTCCAGCTACATGCAAAGAGCTATGAAGCTTAC
TATCCCACCTTTTATTTATGAAATACACTTTTGTATTTTCTTTGATCACTAAAAGAGACTT
GAATAGCCTTCTTTGCCCTATCCATTGCTTCGTACATGTAGCCCATTGGTGGCCTTTGC
TCCCCATCCACCAAACAAAGCACTTTAGCTAAAGGACCACCAATCTTCAATGCATGAAC
CACATTGTTCAAGAATGAAGGAGAAAGTATAATATCTGCAAATTCTCTCCCTCGAGCTTC
CCTTCCATAGGCACCGTTAGTGTACTCATCTGAAACAAACAACTTCTTCAAATTGCTTTT
TTGCTCATACATCCTATGCAAAGTCAAGAAAGCGGTAGTAAATTTTGTCTTTGCAGTTTC
ACCAAGCTTCTTTGTTTAGTGAATCTCTTCATCATATTCAATAACAAAGGCCTTTGAACAA
TAGAGGAATGCACTCTAATTGCCTGATTAAAGACTGAATTGATGGGTCTTTCCTTGAAAA
TGTCACCGAAAATCAAATTAATGCAATGTGCTGCACACAGAGTCCAATAAATATGCGCG
TACCCAACAGACATCAAATCACCAGCTTTAACATTTTCACTGGCGTTGTCCATGACAACA
TGAACAACATTTTCTGCTCCAATAGAGTCTATTGTACTCTTGAACAAGGAGTATATTTTG
GTTGAATCAGTCAAAGAGTCGCTTGCATTAACGGACTCAAGAAACATACTTCTTTTAGGA
GAATTCACCAAGATATTGATGATCATTTTTCCATTTCTCGCCGTCCACTTATCCATCATAA
TGGAACAACCAAACTTGTTCCATTCTACTTTGTGATCCTCCCCGATTTTGTTCAACTCTG
CCGCCTCTTTTTTTTAGATATAGACCTCTAACTTCATGATAAGTTGGAGGCTTCATTCCT
GGACCATATTGGCCTACGACATCAATAAAAGCAGAAAAAGTGTCAGTATAATTAACACA
ATTAAAAGGAAGACCTGCATCATACATCCACCACGCAAACATTGTGACTGCACGAACCC
TCAAAATCGCTTTGGCATCAATTTGAGGATTACCACTTTTTCCTCCCTTATCCCCAGATT
TTTGCGGGAAGTAACAATCCATAGGACCTTTGGTCTTGCCAGTAGATCCACAGCTAGAA
GACATTGGTTGCATCCTTCCCTGCTTTTGTGATTTTGGTGGAAGCGACGAAGCATCGTC
ACCTTCTTCTGTTTCATCATCGTCATCATCATGATTATACAGTTCTTGTTCATGAATCATT
TGAGTCTTTAACTCTTTTTTTTTTTGAAGGAATGCTTTCAATTCTGCCTTCACATGCGATG
GAACTTTAGGACAATATGCGACATTTGGATCACCACCGATTAGATGCGCTATTTGACCG
ATAGATTCCCCCATTTGAAATCTTGTCACAAAAAAGACATCTAATTGCCATCTTGTTTTGT
TGGTCTCGCTAACTCTTTCAGAGTAAGTCCAAGCCGGATCTTTCCTATCTTCTTTTGGTG
CCATTAAAAGAACAACTACATAACACATAAGAAAGACAATAAGAACTAAGAATAAAGGAT
ATAAAAATTAGAGGAAGGGCAGTAATTCTCTTTTAAAAATTGGGCAGAGTTAAAAAAAAA
AAAACTAGGCAGTAATTCTCTGTTAAAAATTGGCATCAATTCTGAGAAAGAACCGAAGGT
TAAAAAAAAAAATTTGCCAGCATTTCGCTGCTTTTTGGACGTTTAAACAGTGAAAGAAAA
AGAAAAGAAGAAGAAGAAGGAGGAAAATCAGAACATACCTGTTGCTGTTGAAGACTTGA
ACTTGAAGTTGAAGACTTGAACTTGAAGTTGAAGTTGAACTCTTGAAGAAGAAGAAGAA
CCCCAGTCGATGCTTGTCGATGCTTTCAGAAGTTGATGAAGAAGAAGAAGTCGACTAGT
GTCTCTGCTTTAAAACCCTAGTCGCATTTGTTCGTTTAATGAAAGACCAGACATCTTGTT
TTTAATAAAATAGGGTTGAGTCTGATTTAAAACACAGAAGCGATCGCTTCTCTCGCATCG
CATCGCTTTCCTGCTTCTCGTTTTTTAGTGGGAAGCGGTCGCTTTTCTACACCTAAGTC
GCTTCACCCTGTTGAAGCGTGCACTTTCTTGCTTCGCTTCGCTTCTCGCTTAAAGCGAG
GAAGCGGACGCTTTTTTAAACACTGATTAACCATGACCATTATAATTGTATACGGGTAAA
ACCGAGCCCATGATGCACCTCGATTTCCGACAAGAGAAGCCAGGCTCGAGATGTGATG
GCAAGGGACAAATATCAAGCCGAAAGTCCCATTGAGCCAGAGCCCTGGGACACGATGC
CTGCCCTCGGGAATATCGAGGTCATAATTACAGAATCGGTCCTAACCTCGAACAACTTC
GAGGAACATTATCGGACGATCAAGCGTAGCCAACAGAAAGCCGAAATATCCATGACCG
GCCGAGTATCACGACGGGGATCTCGGCACGTATCGATAAGGAACCTTCAACCAGTTAA
TCAGAAGACCTTTTACCTTTTACAGAGTTGTACCTAAAGTAGGACTCCCCTACTATATAA
AGGGGGTTTGATAATTCATGTAACACATTGAAAACACGCGTTCCAAGGAAATATATTATC
ATTTTCTCTTTTATCTAGCTTTTTTCACTTGTTCATCAGTGTTGACTATAGCAAGCCCGGG
ATCGAGGGTGAACAATTTTACTAAGGTTGAATCTGTCTTATTCGCATGGTTTGAATTCAT
TTTATCTTTACTAGTTCAATCTAATCCAATTTATAGCTTTGTGTCAAATTAATCCGCGTAT
CCTTAAAACCACTTATAAATTCAATTGTTATCCGATTTTGAGGGTAAACAATAATGAAAG
GAAATTGAACGATCAGCTTCACTTTGGACACTTCCCATGATATTGGACCACGAACTGAA
TTAGAGAAATTCCAAGCCACACTCCCTATAAGTGTTTTAGACCATATAAGTGACTGTCAA
CAGCATACTAAGCCTGAATCCTTTGAGCAACAAGCTAGAGTGGTTGCTTCATGTACACC
TCCATGGCTAATTCTCCATGCAAGAAGGCATTTCAGATATCCTGTTTATAAAGTGTACAT
TAAAACATTGACGCTAAAAAGTTAAACAGTTGTGTGGGTGGATACCATATAAGTAGCGA
CGTCCAAAAAACACTTACCAGAATTAGCATGAGTTTCAGATTCAAATTCCTGCGGAGGC
AAAAGACACTAGGTGATTTCTTTTTGTATGTCCAAGTCTTGGTGAACATATGTGAGAAAG
AAAGAGTTTGAGAGAGAACTCAGCTTGATTATTACCTTAAGCAGTGGGCTTTAAATAGCT
AAGTGCACATATTCTAAGTATTAGATCAAGTTTGAGACCTAGTAAACTTCCACAGGAAAA
GGGATAGAGTCAGATACCTAAACCTAGTTATACTCTAAAGTTTTTATGTAATTAGACCTC
CTTAGTCTCTATCCTAATGGTATAGTCTCATCTGTGCTGTCCCAAATTAATATATTGAAG
AGAAATTCAATCCCAAAGTTGTGTGTGAATTTATATGGTATCAGAAGCCATGTCGATATC
TTCCTCCTCCTCCCCTCCATCACCTACACTCGTTAACCCTCTTTCTTCGTCATCTTCCTC
GCATGCACCCCTTGACCATGCTCATCACTTCATTTCAGTTAAATTAACTTCTACGAAATT
TTTCTTTTTTGGAAGACGCAACTATTACATTTTCTTCGAGGACAAAATCTCCACAAAAACT
CCACGGCTATATTGATGGAACTAATCCTTGCCCACCATCACACACTACGGTTGAAGGCA
AAGAAATACCAAATACAACCTATGTATAATGGATCTAACAGGACCAATTGATTCTTAGCC
TGTTGATTTCATCACTTTCCAAAGAAATGTTGCCCATGAAAATTGGTTTAAATACCTCCA
AAGCAGTTTGTGATGCACTTGAGGCAGCCCTATCCGAACCTTCAAATGCACGAATCCTC
AATCTTCATATGCAACTTTAAAACTTGAAGCAAGAAGATCTTTCGGTTACTCAATACTTG
CACAAGGCCAAACTCATCTCCGACGAGTTGGCAGTTGCTGCAAGGCCCCTTCGTCTTG
CCGATCAAAATGTGTACATCTTTAAGGGACTGAGATCTGATTTCAAGGACATTGTTACAA
CTCTCTCAGAACGACATGAACCAATCACATTCTCAGAACTTCACAGCCTCTTGCTTAACC
ATCAATTTAGACATGGTTCCTCTATCTCCTCACTTTCCTTAACCACCCCAAAACCACCTG
CTCTTCAACAATACCCACAGCTAACTTCAATCAACGAACTACAAATCTGATCGTAATAAT
GGTTTCAATTCAAATAGGGGACGAGGCAGATCTTCGTGTGAAAGAGGGGGTAGAGGTG
GTTGTTCATCCTCAAGGAATTTCTCTAACAATGGACAATCTTGGTCTCAATATGATCAGC
GAACCCGGTGTCAAATATGCAATGGTACCAACCATCTTGCATCAACTTGCTTCCAGAGG
TACAATCACTTGATTAACCCTATGGCTTATTTGTCTAACCAAGCTCCTTTACCCTCAACTT
TGCAATGGTTTGCGGACATTGGAGCCACTCGCTACATCACTTTGGATCTCACAAATATT
CATCAAGTTGAAGATTATAGGGGTTCAGATCAGGTCCAAATTGGCTATAGACATGGCCT
TTCTATCCATCGCACTGGTAACTCCTCTCTCTGATCACCCTCTTGGTCTCTCTATCTTAA
GAATATCCTTCATGTTCCTTCAATTACCAAACGTTTACTCTTTGTTCAACTTTTGCTCGTC
ACAATAATGTCTTCGAACTTCATCCCTTTCATTTTGTTGTCAAGGATCTACAATCCAGGA
CACCTCTTTTTACAGGGCAGAGTGATGGCGATTTATACACACTTCCATCCAAGTCTTCTT
CTTCTTCCATCTCCCAGCCAGTTCCAGCCTCTCCAACAGCTTCTCTATCCATCAACACAT
CACCTTCATGCTGACATCTTCATCTTGGTCACCCCCATCAACTAGTACTTACGCAGATTC
TTAGGACCTACTACAATCTGAAATGAATGCTTTGCTACGAAATAATACCTGGTCTTTGGT
TCCTCATAATCTTTCAATGAATGTTTTAGGATGCAAATGGGTGTTTCTCATTTAAAAAAAT
TTCTATTGGGGCAATTAAGAGATGAAAAGCCCATCTTGTGGCTAAAGGTTTTCATCAACT
TGAAGGCCAGGACTACTCTAAGACTTTCAGTCCAGTTGTAAGGCTGCAACCATTTGCAT
TGTTCTATTTTTAGCAGCTTCACATGGGCGGTCTCTCCAACAATTTGATGTGCAAAATGC
AGTTTTACATGGTGAGCTTCAAGACCATGTGTTCATGAGCCAGCCTTCAGGTTTCATCC
ATCCTCTTTTTCCTCATCATGTTTGTCAACGTAAGAAGTCACTATACGAGCTCAAATGGC
TCCCAAGGCATGGTATATGCGTCTCCATAAGTTCTTGCTCAGCGTAGGCTTCATCACCT
CTAGATCGGACACTTCCCTGTTTGTCTGCAACTCAAATGGTGTTGTCGCCTACCTCTTA
GTATACGTTGATGATACATAGTCACTGGCAGTGGTACCTCCTTTTTAGAATCCATTTTCC
TCAAACTTGGAGATGTCTTTTCCATATGTAATCTTGGTCCTCTCAGTTTCTTTCTTGGTCT
TCAGGTTTCACGTGATCACCATGGCATCTCTATGTCCCAAGCTGAACACATTAAGACTA
TTCTTGCAAGAGCACGTATGTAGCACTGCAAACCTTTAATTACTCCCATGGAAGTGAAT
GTCAAACTTCACAATGGAGAAAGTCTTAGCTTTCATGATCCTACCTTGTACTGTCATATT
GTGGGCCTTACAGTATGTTACTCTCACTTGGCCGGACTTAGCTTTTGTGGTGAATAAAG
CTTGTCAATTCATGCACAATCCTACTATGAGTCAGTGGGCAGCAGTCAAGCGCATACTC
TGCTATTTGATGCATACCCAACGTATGTGTTTTCACATTCCTAGGTCTCTTACACTCACT
TTTCAAGCCTTCACACACTCAGATTGGGCAGGTTCACTCGATGATCGTAAGTCCACTAC
GGTTATGCCATTATCTTGGGTGAAGCTATTCTCATGGTCGTTCAAAAAGCGGCGCATTG
TAGTAGATCTTCCACAGGTTCAGAGTATAAAGCTTTAGTAGATGCAGCTGCCGAGCTGA
CTTGGATTCTGTCTCTCTTGTTTGAGCTTGGTGTTTAACTTCCCAAAGCTCCAATTCTAT
GGTTTGACTACCTATCTTTCGGTAATCCTGTGTTTCATGCACGAACCAAGCATGCGGAA
ATTAATTTTCACCTTGTTAGACAAAGTAGCTCGAAAGGATCTCACAGTTCAATTTTTATCC
TCCAAAGATCAGCTTGGTGATGTCTTCACAAAGCCACTAGCTTCCTCTAGATTTGAGTTC
CTTTGGTCGAAGCTCAATGTGGTTTATCCACCTCAGCTTGCAAGGGAGTATTGTATCAA
CTTTGAGTCCTGGTAAACTTAGGATATAGTCGGGTACCTAAACCTAGTTATACTTTGAAG
TTCTTATGTAGTTAGATCTCCTTAGTCCCTATCCTATAGTATATACTCATCTCTATAAATG
TACGACCGCTGTACCAAATTAATACATTGAAGAGAAATTCAATCACAAAGTTGTGTGTGA
ATTTATACTAAAAGGAAAGAGAATTAATCACAATGAAAATACAATCAAGCTATACTCTATT
TACAAGATCCTAGAATATTCTAGAATATTGACAAGATTCTAATAAGAGTTAGCCCGTATC
TGTGCTGGTGGGAGGTAGCAGGTATCCTTTAGAATTAGTGGAGGTGTGCGCAAGCGCC
AGAACACCGTGGTTATTAAAAAAAATCCCTACGAATTATTGGTATGAATAACAACAATCT
CCTCTATCATGGAATGACTCCATATTAGATGTATCAATAATTTTCCAACGTCTTTTAAATG
TGGAAACACTAGAAAAAGTTGACACATTGATTAAGAAAGTAACAAAATGATACGGGAAG
TACGAATATCTTTGCGTGAGGTAATGAATGGAGTTGTTATGTCTGTTGAAGGCATGATTA
GGATTAGTGATGGAGGAGGAGGAGAAAGTCATTGAATGCTGGCGATGTACTTGTATCA
TGAGAAAAATCTCATCTGTATTAGTAGGAGGATGTTTATGAACTGATTAGACTCGGACA
GGACAAACTTGTGTTTTAAGAAGTTAGGGACTAGTAGATGTCAGGAGGGAAATTTTATTT
CATAGAATTTGGTGAAAAGTATAGAGATGAGTGGGAGGTTACATTTGCTGGGACGAACT
TTACTTTTTGGGGGATTATAAACATTTGCAACTTTTCTTGAAAATGGGTGAGTAAAAAAA
GACACAATTCTGATTAGGATTGAGGTCTGTCTTTTCCAGTAGTGTGATCATGAAGGAAG
CAAGTACATCCAAGCACTTCCAATTGTAGATGGTGGAGATTTTGATCTGGAAATTTTAGT
GTGGACAGTAAAGTTGCAACATAGAAAAGATTGATTTGTACATTTGCCATCGATAACAAT
GCTTCTAGCAACATGATTCTAGGGTGAATGGGTTTGTTGGGGCTCTATGAGTCTTCCTC
GAGTGGCGGTGAGGTCTAGAAGTCGATGCAAAGAGAATTGAGTGGTACAGTCAGTGAC
TATGACTCATTCTGTCAGCCTCTGTAATTTTTTGCCGCTATAGCTTTTCAGTAAGTAGTTT
CTTCCCTGGTTTTAATGTCATGAAAACTAGAAATAAAAGAATGAAAAATGATGGAAAAAC
TTGATTATTTCCTCAAGTTTGATTAAGAACTTAAACTAGTTACAATGTTGGTAAAATACAG
AATATGGTGAAGTAATTCTCCTAATGTGACTCATTCATAGCAACTGAGTTAACCCAATAA
ATGCAAATGACTGGACGATCTCGACAAATCCAAGTCTATCAATTTCAACAAGTTTCGCTG
CCTTAATCATGACAATATATTTAAGTGATGGTCATTAAATTGGAAAGAGTTGCTGTTGCT
CTTGTTTTTGCCATCATTCAGCTGTTCACTGTGGTAGATTATGGTTTCCTACCAAGTCCA
ATGAAACTGAGCAGTCTTGACAATGCCTGATGTTCAGTTTCTAAAGTCTGTTCTCTCTCC
AAAAGTAGAGGAACATAATGTTATCTGATTGGCTCGGGAAAAAGTTGTATGTAGGGTGA
AACCTTAATGACATAATGAAACATGTAATGGTCTTTGTGCCTTTGGTTCATTATGTCTGC
TACTAGATACTGAAATTGCTGCTGAAAGTGCTTTTTGAGGTGTCACTCATTTTTTCTTGC
TGCTATTAATACATAGCGTTCTGATTCTTTTCAGACCCAGAGGGAAAGTATGAGGCACTT
GAGAAATATGGAAATGACTTAACTGAACTTGCCAGACGTGGAAAACTTGACCCGGTGAT
AGGAAGAGATGATGAAATACGGCGCTGCATCCAAATATTAAGTCGGAGGACAAAGAATA
ATCCTGTTATTATTGGTGAGCCTGGAGTGGGGAAAACTGCAATTGCCGAAGGGTATGAT
CTCTAGCCTTTTTTGGTCTCACGGGGTGATGTATGAACATGTTTTTCCTTATATTTATTTG
TCTGGATCCTGGTTCAGTTGAAAACAATCCAAAAACAGTAATGGAATAGCAGATCTGTG
GAGGACATTTTTATTATTACTTGTCTACAATGATATTCTTTTGGTTGGATATGCTGTTTTA
ATTAGTTTTGTTGAATAATGCTGCCTGGCAAACCAAACATTGAACTTTAAAAGAGTTATG
TTTCTAGAAAAGATATGCTCGGAATAGCATGATTATCCACTCAGAGAGGTTTGTGATATT
TAGCAGACTGTATGTGGGGTTTACAGGAAAAAATCATTGCTAATACATATTGTTTCTGGA
CAATACGTTATTCCTGTTAACTATTTGAATTGTGAGATGGGTCAGGGTGTGTTATGTGGA
GTTGTTGAAAATTAGTAATTGTAGGATGGAATGAAACAATTATAATCTTTTTTGTTTACCA
TGGTTCCTTGTGTTTATTTTTAATGAGCAGTGGCGTGGTAATGAAATGTAGTTATAGAAC
TTCTTACTAAGGGGTCTGCCTATATGTTGCAGAATCAGGATCGCTGACAAGGTTCAGTG
AAGAGTTCTGATGGATGCATTCAACATTTCTTGAAAATATATATCAAAATAATGCTGTTGT
TAGTGAATCACTGAATTTGTGTTAACTTCCCTTTGATTTGAAACTACCTTACCCGTAAGC
CTGTAAAATTGAGGTGGCTTGCAGAGCCTTTGAATGATCAAATTTCTATTTAATAATTAAT
ATAATGCCAAAATTGTGGCAGCTTGTAGAGCCTCTGTGTGACCTCGTTTTAACTTTTTAC
ATAGGTCCAAGGTAGTGTTAGCTGTAATATTTGCGTGTACTTAAGAGTCCTGTTCAAGT
GGTGGCATTTTTCACGTCATCTACTTTATGCAATATGTTATGTTTCCAGCCTTCGTGAAA
TGGGGATGTGTTTTTGACAGATTAACTGATAAAAGTCAATCAGTTCTGTCTCTTGTAATG
ATCTTTTTCCAGCAAAGGAGGCTTTTTATTTATTACTTGTTACCAGTACGTTATGAGATTT
AGAGCCTTTGTGGTTTGGATATTTAAAAAGTTAATCAATACTTACTTTTTATTAGATCAGT
TGTGCTAGTTGTAACTTACTTATCTTACATATCGGAATAATTAGTTTGGTTTAACTGCCAG
ACGAATGTGTTTCTGCACCGGAAGTGAATAATTCTAAATTGATATTGGATAGTGACTTAT
TTGAGTGTATCTGCAATATAGTTTTTTTTTGCTTAGACGTAGAGAAAGCATATGATGAGT
TGGGAAAAAATGTCGTTTAGTGGGTGCTTGAGAACAAAGAAATTTCTACTCAAAATATAT
AAGTACCATAAAAGATATATATGAAGGAGTGGTCACAAGTGAGGGACCAGTGGGCGGA
GATATTGAGGAGTTCCTTGTAACCGTGAGTCCATAATAGGGAGCTGCCCCATAGTTGCT
TACCCTGGCTATGGAATAAGTTATTCAGTAGCAAATAGGACGGCATTATGGGATATGCT
ATTTGTCGATGATATTTTGTTATTTGACGAGGGGCAGGGCAAGAAAGTAACAATCATAC
CCGAGAGAGTCAATTGTTAATTGACGAAATTAGTTAGGAGCCGATCAAAAGTTGGAATT
ATGGAGAAGCACGCTAGAGAATAAGGATTTTACAATAGGTAGAAGTTAAACAGAAGATA
TGCAATGCAAGTTTAGCTTTTGAAGTGAGGTTAGATAGGATACTAGTGTCGAGACAAAA
AATTCAGATATCTAGACTCGATCTTTCAATAGAATGACATGATAGATGAATATGTAACAC
AATAATATGATGGCCGAATTGAAGGAAGCCCATGGAAATGCTTTGCGATAATGATATAG
CTACTAAAGTAGAACATAAGGTCTATGGAAACTGGTGATATAAACAGGGTTATATAGGA
GTAAAGGCTGGAATTTTAAGACCCACAATATCGGCAAGATTAGCATCGTAAATATGTGG
TGTCAGATGGATGTACTATACGACCCAAAAATGGTTGAGTCCAAGTCACTACATTGACA
AGATGAGCATCGCAAATATGTTGCGTCAGATGGATGTATACACACCAAAAATGGTTGTG
TCCATGTGAAGGTGCATGTAGCACACAGTGATAGTAAATTGAGAGATGGCCACATTTCC
ATCATGTCTTTCCTAGGCCTTCCAAGTGCATTGGTTTATTGGTGAGACTATGATGACTAA
AGCTGTTGAAAAGGTATGAACTAGATCTAAAATTACATGAAGAGAAGTCATCTAGAATCA
CCTACAATCTCACAGAATCTGCGTGGATTCATTATGAACATAGCACAATGAAAGCAAATT
ATCAAAAGCATGCAATAGTAATTAGCTAGAGTTGAAGCCTAGTCGCTATTGCTCTTACAT
TAGGTTGTGTGTTTTCCAGGAGCTTTTAATTTGGTTAGAGATTTGTATATCAAATGTGAG
ATATAGAGACCCTCTAGTTTTAACAAACACCCTTAAGTTATCTCAAAAGAGAGCAAAATA
GATAGATGATTCATATAACGATCCCAACTAGGTTGGATTTGAGGTATTGATTAGAATGAT
TGATATAGTTATCCAAATTTTAAAAATCAACCTTATTAGTAAGGCAAAGATGCTCTTAACA
TGTTAAAAAGAAGTCGAACAAGAAATTGTTCTTCCTTTCCTTTGATATAAGATATTTCTCT
CCCACCATCCTGGAAGGAGAAGGTAAGGATTGTGAGAATGCATGGGAGAAAAATCTAT
CTTTTTAAATATATGATACAACGAGCCCTATATATAATATATATTCTACTCCTACTACATAT
AGGACTAGGACATATTCTACTCCCACTGACTGGAATGATGCACACAACGGCTAGAATAG
CCTCCAGAGAGGGTGGAGCAGCAACCGAAGAAAATGTTGGCGGGTTGGGCTGCCGGT
AGACAGAAGTTATTGAGTCTCTACTAAGAGAATAGAGGTTTTGGTATCATGAGAAAAGA
AGAGAGTACTTATTGACTTGATTATTGACACAATGAGAGTGTTTTTTATAAAGGATTCTTA
TTCTAGTGATATAAGCTTAAGTATTTATATTATGCTAATGATATGAATAGTGATTTTTCTCT
TGTAGTTAAGTAAAGAATACTCCAAAATATCATATAAAATATTTTACATATTCTCCTATTCA
GATACAATGAGACTAGGCAATATTAACCTATAATTACTTTGATTCTTTTGGTATTTTAACA
CGGTTTTTAGTCTTTAAAAGAAATCAGGAAAAAGAGAGGTGAAAGATGGTATCAGCCAA
ATCTATATGACAATTAACCTCGGAATGATTATGCTTTCTGCTCCTCATCCATGCAGGTTA
GCTCAAAGGATAGTCCGCGGTGATGTTCCTGAACCTTTGATGAATCGGAAGGTTATAAC
TTCTCTTCCTTGGTCTTAATTTGATTGACTTTATTTTATTGTGAAAAGGTCAAGTGATTGT
GCATATGCAAGATCTTGGAAGATGGCCTTTGCGTAGTGTGCATTGGATTGCTTTCTCTT
CAATTTGAAAAAGATAGTATCTGGGAAAGGCATGTCTTGAAGAAATAAATCAATGGTTGA
AAACCTGCTGCCTTTCTCTTGAGAACCATGAGCCGTAACTTGTTGCTTACTGCAAATAGT
TCTGTTTCTCGTGTTGCAGTGATTCATTTGTATGACGCCAGTATTATTGGATCATAATTTT
CTTTTCAAGATATGAGTCTGCTAAAGACAGTTGATGCAGTCTTTACTCAAATGAACGACC
GTGGTTAAGTAACATATTGTTTTAATCATTTCTGGGAGCAATTTCAGTCGAGTTTGATAC
TAAGTGAGATATGCATAACATTGCACTCAAATGTCAAACTAAATTTTGATCATCTAAGCT
AGTCCGATGAGTTAGTCTCTTTTCTGAAACCCCCAACCCCTCACTCAGCAAAGGGGTAG
GAGAAAAGGAAACGAACCACCTCATTCTCTAAAAAGAGTGGAACTAAATTATGATGCCT
CCTAAAGTAAAGTAGTTGGACATAAGTTTCTGAAGTTTCAAATTTGAGAGTGGGATTCCG
AGGAAAGCCTTCTGTAGCTTGAACCTTAATTGTCTACTAGGATTTGTTAATTTCGACTTT
TAAGTGCTAATACTGTAATTTGATTTCCTTTTTCCTTTTCATTTTATTTAGTTGATGTCTCT
CGATATGGGTGCCTTGCTTGCTGGTGCAAAGTACCGTGGAGATTTTGAGGAAAGGCTG
AAAGCTGTTTTAAAGGAAGTCTCTTCATCCAATGGGCAGATAATATTGTTTATTGATGAG
ATACACACTGTAGTTGGTGCAGGTCTGGTACTTTTTTTTTAATATCCATTTCTCCATGAA
GGAAGAAGTTTATTTCTACCGACTGGTTAGAAAATTTGCCAAATGTATTCTTTCTCTCTA
AGATCAAATCTCTATTATTTATAGAGTTCGATATTAAAGAAAAGTGCTGACTCAAACTGC
TTGTCTGCTTTCAAATCTCATGGCGTGTGGACAGCAAGTAGTGACTGCTCTTTTTGTTG
GATGATTTTTATCCTTGCTTAATTCAATCTTAAACAATCCAAAGTTCATGATTTAATTCATT
TGATGTCACTGGGAAACACTTGTTCTTCATTCTAGTGAGGTTAAAAAGCACTATTGCTTC
GTGATTGTGTTTTAGGTGATCCATTTTTAAATTTGAGCCTGGAGCTGGGAAATGCTTGAA
CTAAAGTTTACTTTTCTGTTAATTTGAGCCTGGACCTTGGAAATGATTGGAATAGGTTTA
TTTTTCTGTTCCATAAAGCTGATAAAACATTACTGATGATGTCCTTTATGTATGCAACCGA
GTAAAGGAGAAGGTACCTTTACACCCAAGATATAGTTTCTGTTTGTAGCTGGCTTATATT
AGTAACTAATTCAGCGAATGTTACTTGGTCAAATTATGTTGATACGTTATATTCTAAAACT
TTTGTTTGTTTATACCTTCCTAATCATTGTGTTTGCTTATGCTTTGTGTCTAGGAGCTACT
AGTGGGGCCATGGATGCAGGGAATTTGTTGAAACCCATGCTTGGTCGGGGTGAACTTA
GATGTATCGGAGCAACCACTTTGAATGAATATAGGAAGTACATTGAGAAGGACCCTGCT
CTGGAGCGCAGATTTCAACAAGTATATTGTGGCCAACCATCTGTGGAAGATGCAATTTC
CATCCTCCGTGGATTGCGTGAACGATATGAGCTGCATCATGGTGTTAAAATATCAGACA
GCGCTCTTGTATCAGCTGCAGTTCTTGCAGATCGATATATCACTGAGCGATTTTTGCCG
GACAAGGGTAGGCTAATGTATCCTTAGAACTGCAAGTTGTCTGAAATACTTGCTTTTCAT
TCCTATAAAATTCTTGTGAACGTTTTTCATGATATCTTCAAATAATACAGCAGCCTAATGT
TACTTTTACATAATAAGAAAGTTACAGGGTTACAAGTAGCTTATTTTTATGGCTTCTTTAC
ATGTTTTATTGCATTGAGTGGATCAATGGGTCCAGATTTTCAAGCTTCTTCTAAATGTTTT
TAGCTGTGCGTGATCTGACATACGTTACTTGGGGCTTTTCACTTATGCTCAGTTCTTTCT
TTTCAGCCATTGATCTTGTTGATGAAGCTGCTGCAAAACTAAAAATGGAAATTACTTCAA
AGCCAACTGAATTGGATGAGATAGATAGGGCAGTGCTAAAGTTGGAAATGGAGAAACT
CTCCCTGAAAAATGACACGGATAAAGCATCTAAAGAAAGACTTAACAAGCTAGAAAGTG
ATTTGAAGTCCCTTAAGGCAAAGCAGAAAGAGTTAAACGAACAGTGGGAACGCGAGAA
AGATCTGATGACACGTATACGTTCTATAAAGGAGGAGGTAAATTGCATCTTTCATTGATG
AGGTCAAATCAAAGTTGCAGTTTTTCTTTGTTTTCTCATGATTACTGTTCAATTTTTTCCG
TTGCGTAGATTGACAGGGTGAACTTAGAGATGGAAGCTGCTGAACGTGAGTATGACTT
GAATCGTGCTGCTGAACTCAAGTATGGCACCCTAATCTCCCTTCAACGGCAGCTAGGA
GAAGCAGAGAAAAACCTGGCAGACTACCGGAAGTCTGGGAGTTCGTTGCTTCGTGAAG
AAGTAACAGATCTTGATATTACTGAAATTGTTAGCAAGTGGACGGGTATACCACTATCAA
ACCTTCAGCAGTCTGAGAGGGACAAGCTTGTCTTTCTAGAGAATGAACTTCACAAAAGA
GTTGTTGGTCAGGATATGGCAGTAAAATCTGTGGCTGATGCAATCAGGCGATCTCGGG
CAGGCCTGTCCGATCCAAATCGGCCCATTGCAAGCTTCATGTTCATGGGTCCCACTGG
AGTTGGCAAAACTGAACTTGGAAAAGCTCTTGCTGCGTACCTTTTCAATACTGAAAATG
CTCTGGTGCGTATTGACATGAGTGAATACATGGAAAAACATGCTGTTTCACGGTTGGTT
GGTGCACCACCAGGTTATGTTGGATATGAAGAGGGTGGGCAACTCACTGAAGTGGTCC
GTCGGAGGCCTTACTCTGTGGTCCTTTTTGATGAAATTGAGAAAGCGCATCATGATGTT
TTTAACATTCTCTTACAGTTGTTGGATGATGGAAGAATAACTGATTCTCAAGGGAGGACT
GTTAGTTTCACAAACACTGTTGTAATAATGACATCAAACATCGGGTCACATTACATTCTT
GAGACGCTGCAAAACACTCGAGATAGCCAGGAGGCAGTTTATGATGCGATGAAAAAGC
AGGTTATTGAATTGGCAAGACGGACTTTCCGGCCTGAGTTCATGAATCGGATTGATGAA
TACATTGTTTTCCAACCTCTGGACCTTAAGCAAGTTAGCAGAATTGTTGAGCTCCAGGTA
ATACAGATCTGTAATCTGTTGAATTCTGATTCTCCTGACTTCATACGTTTTTCTTCTGTGT
TGTTTTCTGTTTGCTGCGGTGTCATCTGCTTTCTGATTACTTTGACTTTAAGAGTTTTATA
AGCACTACAGCAGATTACTGTTTGTGCGTTATCTCTGTAAATTTCAGTTTTTCTGTGTGA
GAACAAAAAAATGTTTTAGTGTGCATTAGATCTCAAAATTACACATAAGTACATCTCATTT
GCTTGGTGGTCGTCGTCCTAGTTTGTCCTCCTTGCTGCTTTCTGATGAGTGCATGGTTG
AGTATGTCAAGCTTGAGAACTGCAGCGCACTGCGCATCCTGTCTAATGTCTGCTCTTGC
AGTAGTTTTCTAACAGAGTATAATGTAAAATATATCATTTCATCTGGTGGTTAAGCTTTCT
CCAAGATGAAACATAATTTGATATCTGTTCTTTGTGGTTCTTAATTTGGGGAAAGTGTTT
GGCTATTTCTTATTTTAACCTTATCATCGCATCTGCAGCCATAGCATAACCTTGGTGAGG
TTCATGGGAAAGAAAGTTACCGAGGCTACCTGACAATATCGTTAACTGATGAAAATATTT
GTAGAACAAAACTTTGTGTTTTCATTATCATTACTATATTAGTTGCTCTCTTTTATCTTTTT
TTCGTCCATCTTTTCTGTTTGAAGAGATTTTTCTTCTGTTTCATGAGATAATTCGAGGTG
GAACTGCTGAGTGCTATGTATTACATGCGGCTGATTATCTATTTCATTTTCTATAAAACC
TTCTCTCTATCGTGAGAAAGCGAAGGTCTCCCTCTGAAGTTATACTGCTGATATTAGAGT
TTCTTAGAACCTGACGACTAGTTCTCTTTTTCTCTTCGCAGATGAGAAGGGTGAAAGAC
AGACTCAAACAGAAGAAAATTGATCTTCATTACACGCAGGAAGCTATCAGTCTACTGGC
AAATATGGGCTTCGACCCTAACTATGGAGCTCGACCCGTTAAACGAGTGATTCAGCAGA
TGGTTGAGAACGAAGTAGCAATGGGTGTTTTAAGAGGAGATTTTTCGGAGGAAGACATG
ATTATCGTTGATGCTGATGCTTCTCCTCAGGGGAAGGACCTTCTTCCCGAGAAGAGACT
GTTGATACGAAGAATTGAAAATGGTTCCAACATGGATGCCATGGTTGCCAACGAT
SEQ 75
GTGAATGTGAAATGTTTCTTTGTTTCTTTCTTTTTTTCTTTTTCTTGTATGTCACTTTTTTTT
TTGCAAGGCTGGAACTTTGAAACTTTTTGTTTGAAAACACAATCATTCGCAGTAACAAAC
AAGAACCACCGTCCCCATCTTCACTCCCATCACTCTTCTTTTCTTTGTTTTCACACTTCAT
ATTTACTCTTCTTTCTCATCCTTTATATTTACATAGCAAAAACAACGTCAAGATTTGCAM
AACACAGCAACCCCCCCAAAAAATGTCAAGATTTACAATGCTAGTAGTTCTTGTTCTTCT
TCTTCTATGTCTATGCCATTTATCAGTAGCAACAATAGGAAGTAGTAGTAATAAGAAGAG
TACTTACATAGTACACGTGGCAAAATCCCAAATGCCGGAGAGTTTTGAAAACCATAAAC
ACTGGTATGATTCATCACTAAAATCAGTTTCTGATTCAGCAGAAATGTTGTATGTTTACA
ACAACGTTGTACATGGTTTCTCAGCAAGACTGACTGTTCAAGAAGCAGAATCACTTGAG
AGACAAAGTGGGATTCTGTCTGTTTTGCCGGAGATGAAATATGAACTTCACACGACAAG
AACACCATCTTTTCTGGGTCTTGATCGAAGTGCTGATTTTTTCCCAGAATCAAATGCTAT
GAGTGATGTGATTGTTGGGGTTCTTGATACTGGAGTTTGGCCAGAAAGTAAGAGTTTTG
ATGATACTGGACTTGGACCTGTTCCTGATTCTTGGAAAGGAGAGTGTGAATCTGGTACC
AATTTCAGTTCTTCAAATTGCAATAGGAAATTAATTGGTGCAAGGTAAAACTTTTCTAAAA
GTTTATGCGGTTAGAGACAAGACATTTTTAAGTTAGTTAATTATATTATATCTCAAATTGT
GGTCGCGAGGATTCATATTGCTTACTTCAACTTTTTTGGGACTGGGACGTAGCAGTTGT
TATTATATGTTAAACTCGTCCTCTCGCATGTTGGTCTGATTAATTTTATGATTTCTCTAGT
TGGCAGTGAAATTTGAATCTGGGATTTTTTGCTTGGTTTGATACCATGTTGAGTTGTCTG
ATTAGTTGCATAACTAAGTGGTAACTGGTAAAGCTGCTCCCATATGATCGGAAGGTCAC
GGGTTCGAATCGTGAAACCAGCCTCTTGCTGAAATGCACGGTAAGGCTGTATACAATAA
ACCTTTTGTGGTCCGGTCCTTACCCGGATACTGCTATGGTATAGCGGGAGCTTAGTGCA
CGGGGCTCCCTTTTGGCATAGCTAAGTGTGTTGAAGAGGGTTTAGTTAAATCCCATTCA
TCAGAGTTGTACTGTACAAATAAGCTAAAAATGAATTATTTTTGTGTATGTAAATTGGTGT
ATCCCATTGATAATACAGGTTTGTACTTTTTTGAATTTCCTTGTTAGAATTATTTTAAAAAA
AAATAAAAAATATCATGGCTCTGCCACTGTTGTGCTCAACTTATCTAAAAGCTAAAACTA
TTAGAGATAAGATATACTTTTAATTACTTAATCATATTATGTCTGTTGATAGGTACTTCTC
GAAAGGTTATGAGACCACTTTGGGTCCAGTTGATGTATCCAAAGAGTCGAAATCTGCGA
GGGACGATGACGGACATGGAACACACACTGCTACTACTGCAGCTGGTTCAATTGTTCA
GGGCGCTAGTCTCTTTGGTTATGCTTCTGGAACTGCTCGTGGAATGGCAACACGCGCT
AGAGTTGCTGTGTACAAAGTTTGCTGGATTGGTGGTTGTTTTAGTTCTGATATATTAGCA
GCTATGGACAAAGCAATTGATGATAATGTGAATGTGCTTTCTTTGTCACTTGGTGGTGG
CAATTCAGATTATTATAGAGATAGCGTCGCAATTGGAGCATTTGCTGCTATGGAGAAAG
GGATTCTAGTCTCTTGCTCTGCAGGTAATTATGCTAGTCGGAAAATATGAAGAACTTCTA
GTACTTCTTAATTATTACATTTTATTTTATACTAGACCAGACTAGTTTAAAACTGAGCGAC
ATTAACAATGAAGATTCATTCATATTGCCGATTCTAACTTGCTTGGGATTGAGACGTAAT
TGTTGTTGTTGCTCTGCAGGTAACGCTGGTCCTGGTCCCTATAGTTTGTCCAATGTAGC
GCCGTGGATAACTACTGTGGGTGCAGGAACATTGGACCGTGATTTTCCTGCATATGTAA
GCCTTGGCAATGGTAAGAATTTCTCTGGTGTTTCACTTTACAAAGGGGATTTGTCGCTG
AGTAAAATGCTTCCGTTTGTGTACGCTGGTAATGCTAGTAATACTACAAATGGAAATCTT
TGCATGACGGGTACCTTGATTCCTGAGAAGGTTAAAGGGAAAATTGTTCTATGTGACCG
CGGGATAAATCCCAGGGTCCAAAAAGGTTCTGTGGTAAAAGAAGCTGGTGGGGTCGGT
ATGGTTTTGGCTAACACTGCCGCCAACGGGGATGAGCTGGTGGCTGATGCCCATTTGC
TTCCAGCAACGACAGTTGGTCAGACGACAGGGGAAGCAATCAAGAAATACTTAACCTC
GGATCCTAATCCAACCGCTACAATTCTTTTCGAGGGAACTAAGGTGGGGATCAAACCAT
CACCAGTGGTTGCTGCATTTAGCTCCAGAGGACCAAACTCAATCACGCAGGAAATTCTC
AAACCGGACATCATAGCACCAGGTGTTAACATTCTCGCAGGGTGGACAGGTGGTGTTG
GACCAACAGGGTTGGCCGAGGACACGAGACGTGTCGGGTTCAACATTATCTCGGGCA
CGTCTATGTCTTGCCCGCACGTGAGTGGTTTGGCTGCTTTGCTTAAAGGAGCGCACCC
CGATTGGAGTCCAGCGGCTATTCGCTCGGCTCTTATGACCACGGCTTATACAGTGTACA
AGAACGGCGGTGCACTCCAAGATGTCTCGACGGGAAAGCCATCCACACCATTTGATCA
TGGTGCAGGACATGTAGACCCTGTTGCAGCACTAAACCCCGGACTTGTTTACGACTTGA
GGGCTGATGATTATCTGAATTTCCTCTGTGCCTTGAACTACACATCAATCCAGATTAATA
GCATTGCTAGAAGAAACTACAACTGTGAAACAAGTAAGAAATACAGTGTCACTGATTTG
AATTACCCTTCATTTGCTGTTGTTTTTCTAGAACAAATGACTGCAGGCAGTGGAAGCAGT
TCTAGCTCCGTTAAATATACACGAACGCTTACTAATGTTGGACCAGCAGGAACATACAA
AGTTAGTACTGTTTTTTCATCAAGCAACTCAGTAAAAGTCTCGGTTGAGCCTGAAACATT
GGTTTTTACTCGTGTGAACGAGCAGAAGTCATATACTGTGACTTTCACTGCTCCTTCAAC
TCCATCAACTACGAATGTGTTTGGTAGAATCGAGTGGTCAGATGGCAAGCATGTAGTTG
GTAGTCCAGTGGCCATTAGTTGGATA
SEQ 76
ATGTTGAAGGCTCTTACATCCTCATGTCTGCAGAATCGTTTCCACGCCGTCACAACGGC
ATTTACCCCTCAAGTTCGCCGTGGCACTGACTCGAATACGCCCTTGCTTCGGGTTTTAG
GTTCGCTAAGAAGTTCGAATCGCAGGGTCCCTTATTTGTCTCGACGATTCTTTTGTTCG
GATTCTACTGATGGGTCCGAATCGAATTCCGAGGCTGCTGCATCCGAAGCCAAGCCGG
CCGAGGAAGGTGGAGATGCTGATTCTAAGGCTTCGGCTGCTATGGTTCCCACTGTTTTT
AAGCCTGAAGATTGCCTTACGGTTAGTTCAAAATAATTCTTTGCACCCGCACCGATAGA
TTTAGACGTGTCTTTAAAATAAATTGTATGACTTTTGTTAACTAATGTACATTCTCAGTTC
AATTTATCACTTCATCATTATTAACTAACATAATTTGGTGCATAATTATGTATTTTCCTGCT
CCATCATTATATAAGTACATTTTATGCTAATATTTGATAACTGCTAAATGACTCCTTAAGA
AAAGATGTTAACTTTTTGTTATAACGGTGTGGCCATGTCTGCTTGTGCACCAAAAAAGAA
GATATTAAGTGAGTTCCTTCTGTTGTTAGTGCTGGTTTTATGTCTTCTTTGGGTAGTTTT
GATATGATTTTATTCATTATTATTCAAATTTGTACATATGGATGCAAACATGACGCAGAAT
TGGGAACAATTTGATATAGAAATTATTTTTAACTTTGGTTGCAACACTCTGTTAAGATTTC
GGCAATCGAAAGGGATGGTTGTTTAAGAAGTTAACTTTCTAGGATATAAAAAAGGTGGA
TCACCAAGATTATATTTCTCGTAGATTCGTACACTCAATCATTCTTTACTAAAAGACCTTC
CCGACCTTGACTTGATATAATGCTGTGAAGGTCAACATTTTATTTTTCCAAAGAGAGGCT
TTTGATACCCTCTTTGTCTCTAAAAGAATGGTTTTATTATTAGATGCTTCGATCCTCATAT
TTTGAACCCAGCCATTCCGTTTGAGATGAAAGAATAGTATTGTAGACTTTTTTAAAATCA
GGCCGTAGTATTAAAGAATCTCGATATCAATCTTCTTAGGATCCTCAGACACCTCACATC
GATGACCAACACTTGTAATGTTATTGTAGCTTCAATTAGCATTAGTATTTTAATGAAATGA
GAATTGACAAATTTTTATAATCTAGTCGTCTTTTTAAAGATTTCTTGTCCTGAATCTTCTTA
GGATCATCAGAGAGCCTCACATCAGTGAGCAACTCTTTTAATGCTATTGTAGCAATGTA
GCTTCAATTAGCATTACCCTTTCAATGAAAAAATGTGGTATTTCAGTACCCCTCCTTCAA
CCACAATGTTATTGATTTTTGCTTCCTTGATATCTCCTCCACTATTTATTCTGCTTTTATAT
GGCTTTTTGGTACTATCCCTTCTTGTCTATATTTTCATTAATGTGGTGCTTATGCTTTCCT
GAGCCGAGGGTCTATTGGAAACAACCTCTCTTTCATCACAAGGTAGGGGTAAGGTCTG
CGTACACACTACCCTCCCCAGACTCCACGGGGTGGGATAAGACTGGGTATGTTGTTGT
TGTTGATACTTCCTCCACTAAGGCACAATCCGCCAACTCCTTAATCAAGTCTTCCATTAG
GGGTAATTCATTTGCAATCATCTCTTTTGCTTCACCTAATGATTTCTAAAGGTTTCGATTT
TTCCAACAATTCTTTCATCTCCATCTCCACTCAAGCATATACCTCTCCATTTTCATCATCT
ATGATCAGCTCTAAGTAATTTCAAGTTTTTTCCCAATCACACAGCTTGGATTTTCGGCAA
TGCACTTGTTCTTGTTCAAATGTTAATGTGTGTTATCTTAGTAGTGTTAAATTAGTCTCAT
TGGAAAGATATCATAAAATTTATGTATTTCTCACCTACACATAGATGTGTCTTTTCTATTT
GATTGTTAGATTTTCTCAGATTGTATCACATACCCTTGGTGATCTTAATAAGGGGCAGCC
TATGCTACCCGATTGGTCAACTTTTTCACTATTCTTTCCGCTTTTGGTGATCTTTAACCTC
ATCCCTATTTCCGTAGACCGTTTGACAGTATCATGCCTCTTTCTCAGTCATCTTTTTAGC
TATAAAATTCCTCCTTTTTGACCATTCTTCCAGTGAGTTTCTGCCACCATTCCAACCATG
TCCCATTTACAGTGTAAAATTACTATTTTGGCCATTCTTCCAATGAGTTTTCTACCATCTT
TCAGGCCAGTATTATGATTATTGTTCCAGATACTATTTTGGACGCTATTCCATTGCTACT
CCAGTCACTGTTTAGCCGCCAATTTGAGCCACATTAGCTGCCACCTTACGCCACACCAA
TGATGGTCTTGATATTCGTGGTATCGCGTTCTCTCTGGTCATTGAGAATCGGTTCCCTTT
TTTTTTTGATAAGGTAAATTGTATTAATCAAAAGGGAGAAAAAAAAAACTCCCGCATACA
AGAAGTATACAAAAAGTAGAGAATTTACATCAGAACATGATTCTCTACAAATGACGCCCA
ATCTTCTACGCAAGTAGGGGCTACATGTGTGCACCATTAAGCGATCAAAGATAAAAGAC
TATTCTTAAGATGTGAAAACGGAGACTCAATCCCCTCAAAAACTCTCTTATTTCTCTCTC
CCCAGACTAACCACATGAAAGCTAACGGGACGAACTTCCACGCCTTTTGCTTGCTTCTT
CTACGGAAATTGGCCCAGCTATATAGCATTTCCTTTACAGTGTTTGGCATCACCCATTGA
ACACCAAAAAGATTCAGGATTGCCCTCCATAAACCCCAGGACACAAGGCAACGCATCAT
AAGATGATCAACTTCTTCCCCTGAGCTTTTACACATGTAGCACCAACTAACATGTGTAAT
TCCTCTCTTTCACAGATTTTCAGATGTCAAGATCACTTCCCTCGCTGCTAGCCATGCAAA
GAAGCACACCTTCGTGGGCGCCTTAGGAATCCAGATCGATGAGTATGGGAAAGTAGCT
TCCTGTCTCNTGCCGCATCCCAGAGAAAATCCCTTTGAAGCCGCTCCAGTTTTTCTGTG
ATGCTCACAGGTGCTTGCAACAGGGATAAGTAATAGGTAGGGATACTTGACAAAGTGCT
TTTAATAAGCACTTCCTTACCGCCTTTTGACAAATACCGTTTCTGCCAGCCTGCTAATCG
TTTTTCAACCCTTTCAATGACTGGATTCCAAACNGAATTTGTTGGACCATCAATTCCTTC
TGGTTTGAAACTCTGAAGACGTGGGGGAAAGAGACCCTCAGAGTAGCCTCTCCACACC
ACCTGTGATTCCAAAAGCTGATTCTCCTTCCATCACCCACCTTGTAAGTGATGTTGCCAT
AGAAAGCTTCCCAGTTCTTCATGATGTTCCTCCACATGCCACACCCGAACGGTGTTGTG
ATTGCCTTGGTCCTCCAACCCCCTCCCGTGGAATCATACTTTTCTGCTATGACCTCCCT
CCATAGAGCATGCTCTTCTACCCCGAATCTCCACAGCCACTTCCCCAGCAAAGCTCTGT
TGAATACCCTGAGATCTTTTACTCCAAGTCCACCCCACTTCTTTGGGGAAGTGACTGTC
TGCCAATTCACTAGATGAAACTTTCTAGTTCCATCTGCCGCATCCCAGAGAAAATCCCTT
TGAAGTCGCTCCAGTTTTTCTGTGATGCTCACAGGTGCTTGCAACAGGGATAAGTAATA
GGTAGGGATACTTGACAAAGTGCTTTTAATAAGCACTTCCTTACCGTCTTTTGACAAATA
CCGTTTCTGCCAGCCTGCTAATCGTTTTTCAACCCTTTCAATGACTGGATTCCAAACAGT
AGTATCCTTTTGCAAAGCACCCAATGGTAGACCCAGGTAGGTAGTGGGGAGAGAGCCC
ATCTTGCATCCGAGAACATGAGACAAAGCATCAATGTTAGCAACCTCATCCACCGGGAA
AATCTCACACTTGCTGAGGTTGATTTTGAGTCCTGATACTATCTGAAATCACTGCAGTAG
CTGCTTCAGGCAGGTCAACTGATCCATATCGGCATCACAGAAAACTAGGGTGTCATCC
GCAAAAAGCAAATGAGAGACCCTTCGGGCACTGAGCACCTCGATCGGAGCTGAGAAAC
CTCTCAAGAAGCCTCCACTCGCTGCACGATCCATCATTTTACTCAGAGCATCCATCACT
AAAATGAATAGCATGGGGATAAGGGGTCACCTTTCCTAAGCCCCCTGGAGCTGCCAAA
GAAACCACACGAGCTACCATTAACCAGGACAGAGAATCTGACTGATGAAATGCAAAACT
TGATCCATCCCCTCCATCTTTCCCCAAACCCCATCCGTTTCATAATGAAGTCCAGGAAC
TCCCAATTGACATGATCAAAGCCTTCTCAAGGTCCAACTTGCACAGTAATCCGGATTCT
CTATTTTTCCTTTTGGAGTCTACAAGTTCATTTGCCACCAGAGCAGCATCCAGGATCTGC
CTACCTTCCACAAACGCATTCTGGGAGGACGAAACAGACACGTCAAGAACCTTCTTTAG
TCTGTTAGAGAGCACTTTAGAAATAATCTTGTAAATGCTCCCCACTAGACTGATAGGCCT
ATAGTCTCTGATACAAGATGCACCTTCTTTCTTAGGCACAATGGTAATAAAAGAAGCATT
GATGCTTCTCTCGAAAGCACCATTCACGTGGAAGTATTCGATGGCTTCCATCAACTNNN
NNNNNNNNNNNNNNNNNNNNNNNNNNNNNNNNNNNNNNNNNNNNNNNNNNNNNNNN
NNNNNNNNNNNNNNNNNNNNNNNNNNNNNNNNNNNNNNNNNNNNNNNNNNNNNNNN
NNNNNNNNNNNNNNNNNNNNNNNNNNNNNNNNNNNNNNNNNNNNNNNNNNNNNNNN
NNNNNNNNNNNNNNNNNNNNNNNNNNNNNNNNNNNNNNNNNNNNNNNNNNNNNNNN
NNNNNNNNNNNNNNNNNNNNNNNNNNNNNNNNNNNNNNNNNNNNNNNNNNNNNNNN
NNNNNNNNNNNNNNNNNNNNNNNNNNNNNNNNNNNNNNNNNNNNNNNNNNNNNNNN
NNNNNNNNNNNNNNNNNNNNNNNNNNNNNNNNNNNNNNNNNNNNNNNNNNAGCATC
GTGCACCTCCTCCTCCTCGAAAGCTCTTTCTAGCCACTCATTGTCTCCCTCCCCTATGT
GGTTGAACTCTATTCCCCCCAAAGTAGGCCTCCAACTAACTTCCTCTTTATATAAGTTCT
CATAAAACCCCACTATCGTCCCGTTTACCTCCTCCTCACCCTCGATCCTCACCCCATCT
ACAACTAAGGACTCTATGAAGTTTCTCCTTCGATTTGCAATCGCAACCCTGTGAAAAAAC
TTAGTATTCGAATCCCCCTCCTTTAACCAGAGCGCCCTTGATTTTTGTCGCCAACTAGTC
TCCTGAGCTATTGCTAGCTCGACTATTTCACTCTTAACCTCCCTCAATCTCACTTTCTCA
GATTCATCTAGCTCTCTCGCCCCTTCCCCGCTCTCTAATTCCCCCAATTCATGCATAAG
CTCCCTCATTTTGACCTTCACCCTCCCGAAGACCTCCTTGTTCCACCTAATAATATCTCC
CTTGAGCAATTTGAGTTTCTTCAACAGACGGAATGAGGGTGACCCTGATACCCCGTAGT
TGGTCCACCATTCTTTCACTTTGTCACAAAATCCTGGCACTTTCAACCACATGTTCTCGA
ACCGGAAGGGAGCACGGACCCCCCTCCCTCTGCATCCATCTAGCAAGATAGGCAAGTG
ATCCGAAGTCAGCCTAGGTAAAGGGATCTGCAACACATNTTGCAACACATTCGGTACCA
GCTCATCCCAGGAGGACGATATCAAAAATCTATCGAGTCTGGACCTTGAGTTTGAATCC
TCCGCCCTGGTCCAAGTAAACCTTTCCCCTGACAGAGGAAGATCAATGAAAAAGTGATC
ATTGATGAAGTCAGAAAACTCCTCCATGGCCGTCGAAATCAAATTGCACCCTAATCTCT
CCTCCGGGAATCTAATTGTGTTAAAGTCTCCCCCTAGAACCCATGGAATGTCCCATTCC
CCCATAATATTAGCAAGTTCCTCCCAGAAAGACACTTTGGACTCTTCCCCTACCGGCCC
ATACACTCCCCCAAATCTCCACTCCACCCCACTCACTCTATCTTTGACGAGAGCTGCCA
AAGAGAAAGCTCCCTTCCTAATCTCCTTTACCTCCAAACTTCTATCATCCCACATAAGTA
GAATACCCCTGGCACTTCCTGCTGCAGGGACCCAGTCATATTTCACCCAACAACCCCC
CAGACACTTCTCACGATCGCATCCGACAAAACTTCCATTTTGGTCTCTTGAAAACAAACT
AGGTTGGCACCCCACTCCTTAACTCCCACTTTGATGATGGCCCTTTTGTTTGGGTCATT
CATCCCCCTGACATTCCATGAAAGGATCTTAACTTCCATAAGCAACAATAGCCCCCTTTT
CCCCACCCCCCTAGACGAGATCCCTTTCTCCATGTCACACACTCGACCCCTTCTCTGAT
ACACCACTACATCCCCTATTTTATTTTGATTAACACCTTTACCCAACTCCCTCCCCGCGC
CTTCGTAACAAGGCTGTTGCTCAATCTCCCTCAACAGTTCTAGCACCCTATCTTCCTTCC
CTTCAAAAGAAACACCTAAGAACTTCCCAAAGTTTAATAGTTTATCCTCCATCCATAAGG
ACATGTCCACTTCTCCAATCCGTGACGAAATTGGACATGCGTCTTCTGTAATTACCTTTT
CCTTGCCCCTACCGGAGGAATGCAAGACCATAGCATTGCTAGTAGTAGGAACTCTGGG
TGTCGGGTGGATCACGTCGTTTCGTTGAGAGGCACCAACCTCAGGAATTAATGCCTCT
CTTGGAGGAGATTGTATTGTAACCTCAGCACATCTAAGCACAGTGGGAGATGAGGGGG
CGATGGAGCTGGGTCCATCAGAGGCGGGGGGCCGTGGAATAACACCGCTAGCTTTTG
CCGGTGCTGCCCCTGGAACAGTGGCTGAAGAGGAGCACAAGTCTCTAGTGTTTGGTAT
AGCACTGTTTGAGGCATCATTGGCAGAAGGAGGAGGAGTGACTTGCTCCCATATGTTTA
GGCGCCTTATCGGACGTCGCTTGATATAATTTGGGCCCTTTTGGATCGATTCTAATAGA
ATTGGGAAAAGTTGCTGGGCCCATGTGTAGAGGCCCAGACCTATGCTTGCTGAAATCTT
GCCCGACCCTATGATAGTTAAGAGAGGACGCATCACTATCCCATTCACGTCTTTTCCTC
CTGTTAAAATTTTGTCTTCTTCTCCCAAGTTCAAACCTCCCGTCACTTCTCGATCTACCG
TCTGATTCCAGCTTAGTCCACTGGTCCGGTGAGCCCTCCCCTCCTCTCAGAAACTGGTT
TCCCCTTCCCTCCCTTCTATTTGACCTTTCCTTTTCTTCCGCCAAAATCGCAGGCATAAA
GACAGGGCGAAATTCAGGGCTCAACCAAACCCTGTAGCTCAAGTAGCCATCTTCCACA
ACAGTGGAGACAGGGATTCGGCCCCCTTTCCTCACCACAATCCTTACTCGCGAGAGAT
CGTGCAAGCTGCAAGTGACATCAATGAAACCCCCACAGATTTCCCCAACCTTCTTGAAT
AGGTCAAGACACCAGAGATGCACCGGGAGACCCACCATGTTGACCACCAATGTTTCGG
CAGGGAAACGAGGGTCGAGACACCCATCGTGCTCCACCCATCTGTCTAACTTTAAGAA
ATTCCCATCAAACCACCTGTTTCCTCTTACGAGAATTTCTGAAGCTTGAGACTCGGTGA
CAAATCGAAAGAGATATTGCGTGTCACCCAGTTTCGATATTTTCAGCCCGTCCTTGACG
TTCCATGCCTCTGCTGTCCAGTTCCTAACAGTTTCTGGAGAACCAACCCATTTGGAGAA
AGACCCAATCAAACAAGAGTTCAAGAAACCTTTACGCCTGAGAGTGTGCTCCTCGGACA
GCGAGAAGTGTGGCTCCTGCCCTACGTCAAGCTTTCGCTGGCATCTTCCCCCAAGTTC
GCGGGCTGGCCAAGATGCAGCTTTGCTAAAAGACATGCTTTCTAATTTTCTAGATTCTA
GGGAGAAGTAGGAGCTTCTCTCTGTAGAGTCCGTCATAGCTAAACCAAGAGCCTCGCA
AGGAGACTGACTGAAGAAGGGAAAGTGAGAGGGAGTGAAATCTGGCCGGAAAAAGAC
ACCTCCGTCGCCGAAAAATAGCAAAAGTGGTCGGAAGTTGGAGGTTGATGGATGGGTG
AGGTCGGAATAGCCTCGCGAAGAGGCTGTCTGAAGGAAAAAAGTTGGGATCTGGCCTG
AAAAGGCGTCACGTGCCGGCGCGTGGGGTGTCAGATCCCGGCGATTCTTTCTGGGGT
AGTGTCGCGACAGGGTTGGCTCTCGGATGGTGGTGGTGGAATCCTAGGATTCATGGTT
CATGGTGGTGGTGAAGGGGTGGGATGGGGTGTCTGTGTGCTACAGTGGTTTTTTTCCG
CTTCATGCACATTGAGTTCTGGTGACTGATCTCGTTTTGAACTGTTCACTTTCTAGGTGA
CGCTTTACTATTACGACTATTGTTCACTATTCCGTGTTTTCCAGAAAAAGCAAACTCAAG
GTGTTCTTCACTTCTTCTTACCTTGAGTTCAAGGACACATAATACAATGGTAATGTTAGT
TAGTAGAATGTTAGTGTTAAGTTAGTCCAACATCAAAGATTATTGTGCTTTTCACACCTG
AAAATTAAGTGTCATGTATTATGTAATAAGTATTCATCAACTTATCTTTTCATCTGCTTCTT
CTATTGTCTCACAATTTTCAGATTAAAATGGAGTATTTTTTTTACAAAGAATCCCATTAGC
AAGAAGATTGTGATTGTGTCTTGGGCACATTGTCAGTTGAACCATCCGTATTGGTTGAG
ATTGTTTCTTTGAAATCTCCTGATATTAGAAACCCGTCGATCCTTGAGTACTTCCTGCCT
TGTTTCTCTCTGGACCATATGTAACTCCTACCTTGCAGAGGCAAATTGATCAACTCTATG
TCAAGACTGAAGCTTCAGAAAGTTCCTAATGATTTTGAATGATTTCTCACCTGCAAGAAG
CTGGTGATTCACATTGTTCAGCAAAAGATTTTTTTTTTGTTTGCTTGTCAAATTAACATTG
TAATTAGAATACTCTCCTTCCCATATGCTCTTCTCAAAGTCAGCATTCAACCAGTTATGC
CTCTTACTTCTGGCCGTACAGAAGGCACCTTGATGGATGTTAACTTTTAACACTTCATCC
TATATTTGGAGGCCTAGAGAGGGTTACTTCATGCTTTAGTTTCAATTTAATCAACAGCTT
CTAGGTTATTTAAGAAGTAAAGCATTGGAAAATACATGCGCGGTTTAAGTAATAGGATTG
CCCTAGTATCTCATTTTTCTTTGAAAAGAAGTTTGATTCATATGTGTATTTCAGTTTTTGC
TAGTTGTTGCAGGATCAGTGTAAAAATGGTATTTATCAGCCTTCCCTAAAAAAAGAGAGA
TACTGAACGAATGCAAAGAAAACACTGTTTCTTGGAGGCTTCTTATTTGCTCATAATTCA
TCTGTTTGTAAGATTTATGGGTGCGACCCATTTCTTGCCTTCTTGGTTGGTTATAGTTTT
ATCTTTGGATAAGATTTACCTGTAAGACTTGCAATTAAGGGCTTTATGTCATTTATCATG
CTAAAAATAACATAAAGTCTGTGTGGGCTGTACTTTTTTAATTCTATATAATTTATAATGA
TGCATGTTGTTTTCTTGGTGCAGGTTCTAGCACTGCCACTTCCACACAGACCGTTATTTC
CAGGGTTTTATATGCATATCTATGTGAAGGTATGGTACCTTGTCTAGAATGGGTTAAACT
ATGTCTTAGTTAGTCTTCGTGATTTTTGAAATAGAATAGATATAAGCTTTAAACATTAAGA
GTAAAATTACTGTCAACTTTCTGAGAGTTGATACTGTTTCAGCTAGTGTTTTGGAGCCTA
TTTCCTCTTAAGTCTATAAAACCAGCATTCAGCTTTAACAATGCTACTTTAATTGATGGAA
AGTTCTTGGCTGAAGTTGTAAGCTTGAAAAGCTAAAACCTTCAATTAGGAGAGCGTCTG
TTGCTCAATTGTAATATTCTTTAGCCTCATTTGGTAGTTTCCAGAAAAATATAAATTCTGC
TGTAATGGCATGCAACAAATTGATCTGAGGCTCCACATAATCCATAAATTTCACTGCAG
GATCCCAAGGTATTAGCAGCCTTGCTGGAAAGTCGAAAAAGGCAAGCACCTTATGCTG
GCGCTTTCCTTATGAAAGATGAGCAAGGGACTGATCCTAATGTTGTGTCTGCCTCAGAT
ACAGAAAAAAACATCTATGAGCTTAAAGGAAAAGACATGTTGAACCGTCTTCATGAAGTT
GGTACACTTGCTCAGGTACATCTTGTTGTTCCTTGTGTTATTCTGTTGCTTTAACTTTATT
GAAGAAGTTTCTGATCAAGGTTGATGCAACTTATGATGAGCCAGATAACAAGTATTAAA
GACGACCAGGTTATTCTTATTGGTCACAGGCGGATACGTATGGCAGAGGTGGTAAGTA
GTTGTCTGCTTTATTTTTTGGTTATAAGCAGCTCCATATGTTTTCTTTTTGTCCTATTTAG
TTCTATTTTTCATCTACATATCCATCATCTCCTGATTTTGAGACTGCCCAATTGACATCTT
GGGTTCATTGCACTTGTATATTTTTCTCTCTTTCCTACCTTTTGTGTCCCAACACCGAGT
CCTTCCCCTTTGGCTTCATATAACTGAGCAGCTGCATTGTCAAGCGATAGAGGTCTATT
GCAATTTGAGGCTAAATGAGCTGTTTTCCCCAGTTGGTTATGACGTGTTATCAATAGAAT
GAAACCCTCTTTTAGTTATTCTTGATTGCTTGTTTGCAAGAGAAAGTAGCACTGATTTTG
TAATAATTTTTGGACAACTGGTTTCCTGCAAAGTCATAGGAATGTCTTTCTTATTGCACTT
CGGGGTTGTAGAAGAGAAAAGCAATTGAGTTTCTTCTATGATGTGCTAGTTTTGCATCT
GTTTGATTGCTGATGCATTTGGTTTGAATGAAATCCTAGACTTTTGATAACCTAGAAATC
TGAGGGTAAGTGGCTCACGGTTTGAAACTCAGTGGATAATGGGCTCACCATTCTACCAT
TGTCCACCTAAATACTAGGCTTTTGTTTGCGCCACGGCACGAACTGTGATGTGCACCCA
ACCTACATATCACGGGCTGTACTCTTACCACTAGACAAAAGCCCCGGAGGCTTAAACAT
ATATTAAAACACATAAAAGTTTGAATAGAATCCTATATATTTGGGCTGTAATTTGGTATAG
AGTCGTATTCTTGGCTTTAGCTGTAAAGCTGGAGTACTCATGCATGGTCAGCCATTAAT
GGGCTTACTTAGCCACTGGAGGGTCTTATGTCTTCTTATTTTTTCGTTTTATTTTGTGATT
GAGGACCTCTTATCCTCTTCTATTGGACTTAAATCTCTCATCCCCTGAGCTCCTCAGTAA
TAATTCTCCTATTATACTATACTTACTGTTGGATGTTTACCTCTCTACCTTCACATGGTAG
GGTAAGGTCTGCGTACACAGTACCTTTCTTGGACCCCACCTGCACGATTACACTGGGTT
TGTTTGTTGTTGGATGTTTGCAGTCAGATTTCCTTATGTAGTCATTTCTTTTGTTTCAATA
AACAATTTCTTCAATATACTAGTGTAACAATTTGATGACTATGCAGTAGATTTGTCACACT
TGAATGTTCACTATCAGATTTCCTTACTTTATTCACCATGTTGTTCTTTTTCCGTCTCAAT
AACCCATTTTGTGAAATGTACAAGAGTAACACCTTGAGGACTGAAACAGTGACATTCATT
TGCAGGTCAGTGAGGAACCCCTTACAGTGAAAGTTGATCATCTCAAGGCATGCCTCAGT
TTCTTGTGCATTCTTTCTACCCAGCAATGATAAACTCATAAAGCTTGATGTTCAGTTTTGA
AATTGTTTCTAAAATTTGCTTTCTTAATTATGTTGCAGGAACAGCCGTACAACAAGGATG
ACGATGTTATAAAGGCGACATCTTTTGAAGTTCTATCAACCCTAAGGGATGTTTTGAAGA
CAAGTTCTCTCTGGAAGGATCACGTTCAAACTTATATCCAGGTGTTAGTCATTTCTTTCT
AAATGTTAAGTCCTAATTGTTTGATTTGGTGATAACTCCAAAAAAAAAAAATTTACTCTCT
CAAAATGCATTGCCTTTTGATATTCTAGCCCACACTATTGTGTGAAGCTCCACAATGCCG
GTGGATTGTGTTAAACTTAGATCATGCCCTAAGTTAGGCATTTCATGCCATTCTTTTTAA
TGGAAAATTATGTTCGTGTTGGTGGTAATCAAATCCATGACTAGATTCTCTGCCTTATAG
TTGATGCCCTGCTGAAAGAGGAGACTAATTAAAGATGTCAAGACTGCTAGGAAATGGAA
GGTCATAAATGTTCTCTGAACCAACTGTATACATATTGTTATACATATTTCTAAAGAGAC
GCTAGGAAGTTTATACAACTGAACAACTGTATAAGATGTATTTGGAGCTAGGAAGTTTAT
ACAATACCTAATTCTCTCTCTGCTGAATTTCTAAAAAGATGCTACTGATTGTTATGAATAG
TGTCAAAATCAAAAGATAATATTGTGGCATGTTTTGCTGAAGAAGTGGGAGTGGAGGGA
TAAAGGGATAGGGACTTACTGAATACTTCTAAGGGAAGCATTTGTGTCCCTCCAAGTTA
TTGGTACACTAGTAATTGGAGTAAGAGACATTACTCCTTTCGACCAATTTCAGAGGGGT
TATCAAGTCTTCAAAGCGTGGCGATATTTGTGGGGGTTGGCTGGAAATTGAAAAAAAGA
CAACTCTAAGAAATCATCCTAGATGGGCTTCGATCAAGGAGAGGAGGCAGATGGAGAA
GATTTCGAAAACCCTAGAAGTGGAGAAGAAGGGTTTTCTTTATAAATTACATGTTTGGAG
TGTAGCGTTGGTAACAATTATCTCCAATCGACGAAATGGAGAAGAAGATGGACCTGCTA
GGTACTATGATGAAGTTTGAGATAGGCCTGCTACCGTAGAAAAGATCGGTCATGTGGG
GGTTGGGAACAATATTTCAAATTCTAAAAAAGTGTGGACAGATGTGGGAGTGGCACGTG
GAAAGGTCTTAAGGTAGAATGGGTCAGTAGTAAAGGAAAGGGCTCCAGAATTGGGCCA
CTTATGTCATGATGTTTGGAAGCTTAACATAACTTTTGGGTCATAAAAAATAATAGATATA
GGCTCAGATGAGTCAACCTTTATTTTCAATAAGGGGCTTGGTCTTTTAGCCATGAACCTT
TAGGGTCTCAGTTTTGATACTCTTTTAGTGGAGATTAATGTCATTAATTTGTCTGAAACAT
GATACATTTTAGACTCCTTTCACAACACCATGATCGGCAAACCGATGAAAGAGCAGGAA
AGCCCTAGTCTGCCACAAATTTCACAGAACTCACATGCAGCTGATTACACAAAAATTGT
CATTCAAGATTAAGAAAACTCTTTCTTCGTACAATCGAAAGAGGCTGACCAAAATCAGAT
AGTTTTTTGAATTTGAAAGAACTAAACCATGGCTTATCGAAGAGGCTACTCAAGCTTTCT
TATGGCTGCATAATAATGTTACAAAGATGAGCAAACAATATGGATTGAATTTTTGTGAAT
GTGAGATTGAGGGTCTAGCTCTGTTCACGAAGCTTGACAGGAGAAGGCATAAGAGAAA
TGAAGCTACCATGTCCAGATTCACAATTCCAAAAGTGATAGGTATAAAGGAGCTCCAAA
AACTGTTTTTTAATGTGAATTATGGGGAGCTCGGATCAATGATGGGAAGGGGGATCACA
AACACTAGGTACCCATGAAGCTGAATATTCTCACTTGGAATATTAGGGGGTTGAATGAC
AGGGAAAAGATAAAGGTGATAAAAAGTTAATCCATAAATTGAAGGCAAATATTTATTGCT
TTCAAAGACGAACTTAGAAGGGGGTGTGGAAATACTAGTTAAACAAATGTGGTCAGACC
CATCTCAAGTGTTGTTTGGAGTCCAACGACAGGAAAGGGAAAATATTGGTGATGTGGGA
AAAGAATGTTTGGACAAGAGAAACTATCAACAAGGGATGTATACTATCACTCGCAAAATT
TCCTCATTATCACAGAATTTCTCCTGGCACCTCACAGGGGTGTATGAATCACACTGCAA
GTTGGAGAAACAAGAACGCTGGTGGGAGATAGTAGCATCTAAGGCATTTGTGCAGGGC
CTTGGGTGGTGTATAGAGATTTTAACACTAATAGATTCATAGCAAAAAGAAAGAACAACA
ATAAACTCACTAGGGCTATGATGGACTTCTCTAATTTTATAGATCATTAGAAGCTTGTAG
ATTCTAATCTTAATGGGGCTCCTTTTACTTGGACAAAGGGTAATAATCAGGAAAACTCTT
CAAGATTGGATAGATTTTTTTCCCGGCTAAATGGGCTGAGGAATTAAAGAACAAAAGGC
AAGCAGTACTCCCCAGTGTATTTTCTGATTGTACTCCCGTTTCTTTTCAATGCGGAGATG
GGGAAGTTTAAAATCTTACTTCAAGTTTGAAAGCTGGTGGTTGGGTGTTGAGAGATTCA
ATGAAATGGTGAAAAGCTGTGGAACTCTTTTGAAGTACAGGGTAGACTAGACTCCATTC
TTTCAAGCTAACTGAAGTTGTTGAATACAAAGCAGTGGGATTGGGAATCTTCAGACTAT
GACAGTGTTGTGAAGAGCCTGAAGCGAGGAAAAGCGATAAGCCCCTTTTCGCTTAAAG
CGAGAAGCGAGAAGCGAAGCGCTCGCTTTTTTGAAGTGAAGCGGTTTAAAAAGATATTA
AAATAAATAATGCATAGACAACACATGTAACTGTAAGCAAATGTTCAATACTTCAATGTA
AAAACTAAAGAGTAGCATCAATTAAAGCACAAAATGAGCATCATATTCTTCTTCAAGATT
GTCAAATTCTTGTATTCCACTATCATTATTATATTGCTCGTCATCTTCTTCAACTTCTTCTT
CTACATCAACTAGAAATGAAGTAACTGCTTCTTTTCCCTTCCTCTGTGAGCTTGAAATTG
AGGTACTCCCCCTCAAACCATAAATTTTCTCCCCAATTCCACGCGCCTCCGCAACATCA
CCCCAAGTGAAATCAGAAGTTTCCTCAAATACTTCTTCATTTGCATGATCTTCCGGGACT
CCAATTAGCCATTCATTAGCATCATCGATGTTGTCCAAACTAATTGGATCAATTACATTG
CGAGCATTGTAACGACGCCTCATTGTTCTATTGTACTTAATGAAGACTAGATCATTGAGA
CGCTTCAAGGTTAGTTTGTTCCTCTTTTTGGTATGAATTTGCAAATAATAAGTAATTAGTA
AGATTGCATGCGCATAACTGTCTGTCATCATTCAACATTCTAACTTCTTGAAGTTGCAGC
ATATTGGTGATTTCAATTATGCAAGGTTAGCAGATTTTGGAGCAGCAATATCTGGAGCC
AACAAGCTACAATGCCAGCAAGTGCTTGAAGAGCTAGATGTAAGTCCGTGGTTCAAGAA
GTTAGATATTCCCTCTGTTTCAATTTAGATGACACACTTTCCTTCTTAATCCGTTCCAAAA
AGAATGACACATTTCTACAATTGAAAATAATTCAACTTTAAACTTTTCATTTTACCCATTTA
CCCTTAGTGAGAAGTTTTTATAACCACACAAATGTTATGCCCCCACAAAGCTTTTACCCC
TTAAGCTTTTAAGTCCACAAGTTTCAGAAGTCTTTTTTCCTCTTAAACTTCCTGCCAAGTC
AAACTACCTCATCTAAATTTAAACGGAGGGAGTACATAATATTTTCTGTATGTGTGCCTT
TTTCAATCCAAACCTCAAAGAGAGAGGTTTACCAGTATTGTGAGTTCTAACCACTCTGGA
AGAGAGCGAGGTTTTATTACTAGGAGGTAGATCTAAGAATTTTTCCTTGCCATTTGCTTC
CTATTGTAACAAAAAAAAAATATATGTTTGGTCAGTGCTTCCCTGCTCTGAAAAGGAAAA
TGGTTGAAAGTTAAAAAAAAGGAGGATCAAAGCGTATTAGCGGTAAAGCTTCATTTCTT
GCTGATGGGTAAAATGGCTTCTCATTGGTACTCTTGCTCGAAAAATTAGGAATCTAAAAA
AGTTATCAGTTTGTTCACCACTTCATAAAAAGAAATTGTCAGTTTGTTCAAGTGGAGCTA
CTTATTTTGGGAAAATTAGAAAGGGAAATATTCAGTTTAGAACAGCTAGCAATATTTTGT
ATTTCCTCGTAAGAATCATAAACTTGCATTACAATGGTTATTTCATGATTTTCATCGAACT
GAGCCTTTTGTCTGCTCAGGGATCAGAATATAGTGTGTGCATGAGATAAAATGAATGTT
TCCCGCTTGTTTCATAGCTAACACCATAATACCTGCATCAGGTGCATAAGCGGCTACAG
CTTACCCTGGAGCTAGTGAAGAAAGAAATGGAGATTAGTAAGATTCAGGTAAATGCACA
TCAAGACGCATACCTGAACTTTAAATAGGTGCTATGCATGCATTTAGCATTTTACGTCTT
TTCTGTTGTCTGCAGGAATCAATAGCAAGAGCAATTGAAGAAAAAATAAGTGGAGAGCA
ACGCCGTTATTTGTTGAATGAACAATTAAAGGCCATAAAGAAGGCATGTGGATTATGTG
CAGCTTTTTTTGTGTTATCATCCTTAAACTTAGTACTTACATATGTTTATTCCTAGATAATA
TATATGTTAAGCTTCTGATTCTTATGTTTGATTCACAGTTTAAACAAAGAGTTGATTTGAA
AAAAAAGTGCTTCCTTATGACGTGATTTTGATTGGCTTAATGCAGGAACTAGGTTTGGA
GACTGATGACAAGACAGCTCTTTCTGGTTCGTTGTCTCTTAATTACTACTGAAATGAATA
ATGTTCTTTTTGGATTTATTACGGCCAGACGTGTTTTCCCATCTGGCCAATGAAACATCT
TATGTTGGCCCTGGAAAAATTCCATGTAGCAGTAGCATAGAAAAGGCCATTTGCAATAC
GTTTTGCCCTTTCTGTTGTAACAGTTTTATGGTGGCTGATTGATCTCCTGTTTACCATTG
AAAATCTTCACTAGAAGCATGAATAGCATTCAGGCGATAATTGGCTTTACAGATAGGAAA
TTGAAGGTTGAATTTTCTTTGTACACGGTCCAACCAACTTTATTGACATGCTTTCTAAAG
CTATTTGAGACATACCAAACTTTTGACAGATAAGAATACATTGTACCTATAGGGGGCTCT
TTGTGTTTTCACTAAAGCACTTAATAAGACAATACTGGAATCCTTCAACTTCAATTTCCGA
AAGGTTACTGTCTACCATATTTGGTAATGTGGCACTAAATCAACATGGATTTACTGGAAG
GCCACATTGTTAGCACTGCATTGTTGTTTATTCAAGTTATGGACTGCTCATGATTCAGAT
TTATCTTCCTCCTCCAATGTTTCTTTTTCTCTTGAACTCTGTCCTGTTTCCCTTTTCAATG
CACTTCCTTATTAGAAGCCTACTTGCTTTTTCTGTCATGTACTCTTTCTTCTCCCCTTTGC
TCCTGTTGAGGAGTGTAATGCTTATGAAGGTGCTTCTTCCAGGTTTTGGTGATAATAGA
CATTACTGCAAACCCTAAAACGCGGTTCTCATTGTTTTTTCTCTATAATTTTCACAAAAAT
AGAGTTAAGCTGCGTGTTGTAACATTGTTTTGGTAGACCTGGTTTTGGTGTTGAAATTGA
GAAGAAACTGCCTAATTATTAGGTTTGCTTTAAGGGCTTCGATTTTTCTGGTCAATACTA
ACGAAAACCTGCAGTTTTTTGTTCCCTTTTTTATTACATCTAATGGTGTGACACTATATTT
GTTTATTACTGCAGCAAAGTTCAGGGAAAGATTGGAGCCTAATAAAGAAAAAATACCAG
TACATGTTATGCAAGTTATTGAAGAAGAACTGACAAAACTGCAACTGTTGGAAGCTAGTT
CCAGTGAATTTAACGTAACACGTAATTATCTTGATTGGTTGACTGCCTTGCCATGGGGT
AATTACAGGTTTGTTGTCTATCGATTCTGCCTTACATTGTCTTGGGTTCAACCCAACTGA
TGTTATCCTTATCCTTGGCTAGCTGTACTAGAGGAATCTGTTTGAGAAGCTGGCTAAAC
AGTCCAGCGAGAAATAAAAATGTTATTCTCTGAAATTTGCTGCTTCCAAGTTAACCTTAC
TGCCTAGTGATGTGACTTGCCTAAATATCTATCGAGTAATATCCATTTGTCTTTAACTTTT
CTTTCTCCTCCAGTTCCTTATTTTGGGTTCTTACATGTCATGCTTCTGGCTTTGAGGATG
CTTACTTGACATCCCAATGTATGAGTTTAGACCAGGATCTCATGAGAGCAGCAAAACTA
GGATTGTACTTATGATGAGCTCCTTAAGATGGGGGCTTGATTTGCCGTAGTTCGTGTTG
TTTGCTGCTGATGGTGGTGGTGTTGGCTTTATAGTTTTGTTCTCTGCCATGGGTGTATT
GCATTGGTTCCTGAAGTTTTCTTTTTATGATCCAAATGCAGTGATGAAAACTTTGATGTA
CTACGGGCAGAACAAATTCTTGATGAAGACCACTATGGGTTAACCGATGTTAAGGAAAG
GATCTTGGAATTTATAGCTGTGGGAAAACTCAGAGGAACCTCGCAAGGTTGGTAAATGC
CTTTTTTTAAAAATAATAACCCTCATTTTTATTAAAAAAAATCCTATTTTATAAGGTTCAGC
CATAATCATATTAAAAGAACGGAAAATGATCCAGCCATCTCCTTACTGTCCATTGTCATA
ACATTATAATGGACCAATGGAAAATATATCCATAGAACATGAGATTTATGGTTCCCAAAT
ACTTTATTGACATCAAATTGAAACGAGTAAACGGAAAGAAGTGAACATTTTAGGGAATTT
GAGAAATATTTATTGGTCAAACTTAGGTAATACTTTTTGTGTCAGTCTAGAGTTCCTCCA
ATGTTTTCTTGTGATTATCTGTGGAGTAAAGAAATATATCTTGAGCTTAATTTCTTCCCTT
GAAAAGCAACTAATGTGAATTAAACTGCTGCACCTTGGGCCATAGTTTGTTGGTGTTCTT
CTTACATTCTGATTTTGTGCTGTCCATGATTGGGCACTCGCTGTGTGGTATTCGATTGAT
AACTTACTTTCACCACCAGTTGTACTTGTATATCTTTGGGACATTGAACTTGAGATGTAG
TTGTTTGTTGAGGATAATCTTTGGAAACTATGAAGTGTTGAGAAAAAAACAGGTTGAATG
AAAGTTAACAATATAATCCAAAGACAAAGGTTAACTCTAGAAAAATGTGAATTGCATCAT
AGCTAGGACAATATTAGGTTCAAATGATAATATTAATCCCAATTATACACTGGCACTGTC
TTTCATATGTGCGGCTTCACCTGATTTATCTCAGTTTAATTTTGAATCTGAGTCAGGAAC
TAGAAACAGACTCATTGCTTATTTTTGTTTGAACAGGGAAAATCATATGCCTCTCTGGCC
CTCCTGGGGTGGGCAAAACCAGTATAGGTCGTTCAATTGCACGTGCATTGAACCGCAA
ATTTTACCGATTTTCTGTTGGAGGGCTGTCTGATGTTGCTGAAATAAAGGTAATGGGAAT
ATCTGGCCAGCTAAAACAGAGTTGTTTTGTGGCGCACAGAATCTTGAACTTTCATGACT
AACTTTGGGATACACTTCAAGGGACATCGACGAACTTATATCGGTGCCATGCCGGGGA
AGATGGTGCAATGTTTAAAAAGTGTGGGAACCGCTAATCCTCTTGTTTTGATAGACGAA
ATTGACAAGGTATTTTATGGTTTGTGAGTTCATGCTTCAATTGTATGGCTTTGACTATGA
GAGGAAGTCTAACTTCTTTTTCACCATTTAATCTCGTTTTTCTGTATATGACCACTGGAA
GAATCTTGAGCCTGAACATATTATGTTTTTGCTTGGATTTCCTCTGCAATCTAAATGTTTG
AAGAAAGTGTTTATCGATCAGTTTAATAATAGCCTTGTATTTTTTCTTCTATGGCAGTTGG
GAAGAGGACATGCTGGTGATCCAGCAAGTGCTATGTTGGAGCTTCTTGATCCAGAACA
GAATGCAAATTTCTTGGATCATTATCTTGATGTTCCTATTGACTTATCAAAGGTAGTTGTT
TTCTGGAGCACTTATCAAATTATTGTGGCTGTTGATTGGCCCTTATGAAATGCCCTCTAA
CATCATTTGATGAATGGGGACTAATGTGATATTAAAAATCTTGCAAATATCTACTATCATT
TTGCTTTTTCACCTTTTGATTTCCCCCCCTTTTTCTTTACTGATTGATGTTCTCTTTCGTC
TCTTACCTTAGTTAAGTTTGGAAAAGGTTTCGTGACTGAGCCTGTTTCTTTTATTGTCCA
TAATGGAAGGTTATCTGGAAGTATTTTATTTCACGTCTGTGTTACCTTTGTCTCTGTCATT
ATGACTGTAATATGATTAGTGTAAGTAGAATGTTGTTCTCTTGATACTTGAGAAAAAACT
AGGTTTCATTGGCATTGGTTTTGGTGATCATTCAATAGGAAAAAGGTTGATGCATTGAGT
TTTCCTACTGTCTGTTCATATTATCTTTGATGGCTTTACTGATGAGGGATATGGTTTTATA
CCTCTTGGAGTTACCGATAATTGGAGCGATAGACTTTGAGTGTTGAGTGTTAGTTTACC
TATTGATTAAAGAATTTGGCCCATAATTCAAATATGACAGTTATCGATACTATTTCATTTT
ATTATATCAAACTTCAGCAAATCAACATGGCTACAGAGAGAAGGTTGATGGGTATATTC
GCATACAATTTCATTTATTTTGTCCTTTAATGTGATAATTTACTGTGTGTTCCTATGTCTTT
TCATAATGGTAAATATTTGTGTTATATTTCCAAAGGGCTTTGTCAAAAGAAGATAGCATC
TTTCGATTATTTTGGTAGTATTTTGGGTCTGACTTGGTTATGGGGAGGGAGGCTATATCA
AAGCCCTGTTATGGATGTTGAGTTATATATGAACCTGAAGAAATTATAAAATCCAACCTC
TAGGTTTTAATGTACTTCTAAAATTTGAAAAAATCGAGCTTTGGCACCTTCAGTGTTTTCT
ATCCTCTTTGCTTAATACAGTTACCTATTCCACTGTAGTTTATACGAGAATGACATCTGC
ACATTTATCAATTTTTTGAGTGCATAATTTGAGGTCGATCATTTTCCTTTTTGCGGCTGCA
GGTTTTGTTTGTCTGCACAGCCAATGTTGTAGAAATGATACCTAATCCTCTTTTGGATAG
AATGGAAGTAATTTCAATTGCTGGTTACATTACGGATGAGAAAATGCACATAGCCAGGG
ATTATTTGGAGAAAGCTACTCGTGAAACATGTGGGATCAAGCCTGAGCAGGTATGTCTT
ATAGAAACATCTCTAGTTGCATCTCTTTCATTATCTCCTGTGCATATTCATTATCGGGTG
AATAGTTTTGTATTTTTTCCGCTCCCAATTTTTGACATTCAGAAGCAGACATTGGTCTGT
CGGGAAAATGTTCGAAACATGATTGGGCAAGAATGTAACTTCTTAAAGTAAAATGTGAA
AAGCTTTATTCAGTTAGAAGTTTATGGAATAAAACATATGATTGGAACATTCAGGGGATC
AAGCTCTTTACACCCTTCCATATAGAACATGGCTAAAGGAAAAAATCGCAGTAAATCTCA
TTATAGGTTTTTTGCCATATGCTTTAATATTTCCTAGAAAATATACTGTTTGATGTATTGAT
ATCATTTTCATCTTAAGCCTCTACATTTAGAATATACTTGCCTCCAAAGCTAATGGATTAT
AAAGTTTAATACAAACTCTTCCATCACTATCCTTTTCAAGAAGTATTTAAGTGGTTCACAT
AAACAACTGAACGAGTCCACATTGCTGTATATATCCTCTCAAGTGCTGCTTTCTCTTTGA
GGAATGTTTGCTTGACCGAGCCAAACTGTGACTGCCTATGCTAGCCAATGTGCTCGTG
CATCATTAACACAACCACTGTGCCACACTTTGCTGGGAGTATAAACGCAATTGAAGGTG
GTTCTGTCGTGGTAGTCGCCAATCTCTATTAGTAAATGGAGGTATAATGAGTTTCTTAGT
GGTAGGGATACATGTGCCTGGTGGGTGGGGTTGCTGGATGGTATTGTCTAACAGATTT
GAGCGGGGCGTGAACTAAAGCAGGATGGATGTTTAAAATATGCCAAGTGTTTTGGTGTT
TTTGCTGTTGACTTCAATTTGACCATCGTGTAAAAGAGAAACTAGACTAGTTTGTTACAC
AGTAGTGAATTTTTTATTACTGTACAAGGAATCATCATACGATGCCAAGATTGTGGTGAT
GACTCCAAAAAACACTTGACAATGTCTATTGAGTGAGCTTAAGTTATAATATGTCTGCAG
TAAACATGTTCTCCCACAGCCTTAAAGATGAGATCCGTGGAATTCGGAGAACCTTATATT
TAGCTCTCTAATGTGATCTTCAGTTGAGTTACATGCCATATGGATCTCTGGTGAAGAAAA
GGGAGCTGAAGACTTACTGATTAAGGGCATCAAAATGACATTTGACCTCATCTAACTCT
GTGGTGTCATGTGGTGTCATTTACTGTGCATATATACTCTAATAATTAACGTTTTCCACTT
TTCCGGGAAAAAACACCCTAAATATGGGTGTCAGAAGTTAATAAGTTGATATGTGGGAG
GGCTGATGGCTACTTTGGTTTGTTTTGGCCCTCCATAGCGGATAGGAGCAGTTCTAATT
TTTGAAGTATCTTGTAGGCTGTTGGTACTTTTTCATGACATAGTAGTGGCGTTATGCTTA
TCTAATGGCAAATGTATGACAGGACGAGGGTAGAGCTTTGGGTACCATTTCTCGGGAAA
TGTTAACTCCCTAATGCTCCTGTAAAATTACTCGAGTTGATATGTAATCAAGTTGAAGAG
ATGCAACGTTTGAGCCCATGTATATGTCATCTCTCTGTCTCTCAGGCTTTTAACATGCTG
AGGGCCGTTTCTCAGATGCAGAGATGTGATATCAAGCCGGAAAATTAAGTGTGCATGAT
TTATGTTAGCAATTGATTGCAATTCAAAGCCTTGAATGGTTGATGTTTGGTTTAAATATTT
CAACACGTATAACCATCCTGGCAGTTAGTATATGTGGTTATAGGAAGACTTTCAATTGAT
GCCTTGATGTTGTTTTTCTAAATATTTCACAAGTTACACTGAAGCGTTACTTGCAATAAG
CTAATTTTATTGGCTTCATGAATTCTTTATTTCAGGTTGAAGTGACCAATTCAGCTCTTCT
TGCTTTAATAGAAAATTACTGCAGAGAAGCTGGTGTACGCAATCTGCAGAAGCAGATTG
AAAAGATTTATCGCAAGGTTCTGTGACCTGTCCTCTTTTGTATAATACATCTATGATGAA
ATTGTCTCGAGTCTCGTACCTAGTCAACTTTTGATGAAAACTGATGGTTATTTCATGAAA
TCCAATACGAACACTTTGAATCGTTTTCATGCTCTGATACTTTGCACATCCTGTTCTTGC
TTTTCAGATAGCTCTAAAGCTTGTCAGGGAAGATGGAGAGATTGAGCCTCAGAATGCAG
AGGTAGGTGAGGTAGAAGCAGAATCTATCCATCTATCAGACGAAATCAAGTCTAAGGAA
GAAATTCAAGCTGGAGCTGAGTCCGCAAACGGTAGCAATGATGACAAGGCCTCTGAAA
ATAATGCTGAAGCTGAAGCACAGGGAGCACCAGTGAATCAAACACAGAAATCTGCTAAT
GAAGATGCTTGTTTACAGGTAAATGAAAAACATTAAAAAGCAAAATTATAATGTTTAGTA
CTTCAGGTGATTCTTGCCAGTTGTAACTATGTATGCTACAATGTATTTTAATGCTTCTAA
GTTTTATCTATGCTCAAAATAAAAATACAAGATGCAGTGTAATAGGTAGTTTTGTAGGCA
CAGAAGTGTCTTTTTACAACTTGTCTTACTGTCACATGTTGGATTAAATATGGTTAACAAA
TGAATGTAAGAAATCATTTATCTGGCAATATAACACCAAACAAGCAGGGGAAGCACTTT
CTTTTGAAATGTTAACTAAGAACAAGCAAGGGAAGCGCTTGGTATTCATTTTCTACGCTA
AGTCCCCCCTGTATCTTAAAAAGGTATCTATGCATAATTTGCATTTATATCAGACTGTAA
GACAAGAGTGGGTTGCTCTAGTGGTGAGCACCCTCCACTTCCAACCAAGAGGTTGTGA
GTTCGAGTCACCCCAAGAGCAAGGTGGTGAGTTCTTGGAGGGAGGGAGCCGAGGGTC
TATCGGATACAACCTCTCTACCTCAGGGTAGGGGTAAGGTCTGCGTACACACTACCCTC
CCCAGACCCCACTAGTGGGATTATATTGGGTTGTTGTTGTTATCATACACTGTAATCAGT
TAAAATCAAATTCTTTGGGATGGAGGGGTTTCTTTAGTCTGGCTAATTAGACTTGATAGT
CAAATTTGTTTTAAGAAGTTGTGCCAAATGTTAACTCACTTGTTATAATCTAGCGCGCGC
ACACACATTTTGATATGTTTGATGTTAAGCTGCTAATGAATAACGTCCTTATATTTTCCTT
GACATTGCATGATTTTATGTTTACATATTTATCTGCGTTTAATTTAATGCTATTGTGTCCT
TGCAACTGAATTTTGGTTCTGAGTGGTTGTGATCTTAACAGGATACTCAAGAAACTGAG
AAAGCAACAGAAAGTGAAGCGAGTAAAACAGTAAATAAAGTGGTTGTTGACTCGCCAAA
CCTAGCTGATTATGTTGGCAAACCTGTTTTCCATGCGGAGCGCATATACGATCAGACAC
CAGTTGGAGTTGTGATGGGTCTTGCTTGGACTTCAATGGGTGGCTCAACACTCTATATA
GAAACATCTCTGGTGGAGCAAGGAGAAGGGAAAGGGGCTCTCAATGTAACAGGACAAC
TAGGCGACGTTATGAAAGAAAGTGCCCAAATTGCCCATACGGTTGCCAGGACCATTTTG
CAGGAAAAGGAGCCTGATAACCAATTCTTTGCAAATAGTAAGCTTCATCTTCATGTTCCT
GCAGGTGCTACCCCTAAGGATGGCCCTAGTGCTGGTTGTACTATGATAACGTCCTTGTT
GTCTCTTGCCATGAAAAAGCCTGTTAAAAAGGACCTGGCAATGACAGGGGAAGTCACG
CTAACTGGCAAAATTCTTCCTATCGGCGGGGTATGTTAACAATTCTTACACCTCTCCTTA
TAATTTCATGCAGCTTTTGTGTCTGATCATCTATCATGTTTTCTTTTTATTTTTCGTTGATT
TTGTCTTTAATGTTCTTTATGCTTTAATTATTTCCTGTGTCTGTATGTGTTACATGCATGC
GCATGTAAGCATAATAAGAGTGGTCTTTTCTTTTTGACCCAACCAGTGTTGGGTTCCTTT
CTTGATTTTACAAAAGCTTTACCTTTTGGTTCAATAATAGGTCAAGGAGAAAGCCATAGC
AGCGCGAAGAAGTGATGTGAAAACTATAATATTCCCTTCAGCCAATCGCAGAGATTTTG
ACGAGCTTGCTCCTAATGTCAAGGAAGGCCTTGATGTACACTTTGTGGATGACTACAAG
CAAATATTTGATTTGGCATTT
SEQ 77
ATGCAGTTTTTCCGAAGAAACCCATCACTTCACAGAATCTCCTCCAGATTCCTTAATCAA
GTTCGTTTTCTTTTCTTTTCCTTTTCCGAAGTATAACTAGCTTTTCAATTTTTGTTTGGCTT
TTCGATTATCTTACTAGTGTAACATATATTTCATATGTCTTGAGGTTCATTGCAAAAACTC
GTTATATTTCTAAATGGGGTTGAGCACGTGGTCCAATACAATTCAGTAGGACTTACAGC
TGTAGCCTGTAGTTAGAGGACATTGGATTAATTAATTATATGGCTGCAATTCAGATATTC
AAAACGTTTCTTTTCCCTGTTTGCAATTTTTTCCTCCAAGTAGTGAAACAGTGGAATTTTC
TCCCCATTCTTAGGTCAAGCTATCATCTTTTTGCTTAAGAGTTGGTTTGGATGTTTACATT
TATTTTCTAACACAATTTGTTTTGGTTTGCTGCTGATATCTCATGAATTGGATACGATAGG
TAGTCAAAACCAGTGCATATTCAACCAAGAAAGTTTACAATGCTGGGCAGCCGACTGCT
GCTACTCACCCTCAGGTACTTCTACACTGCATATGTAGTATTGACATTTGGTAGCATAGA
ATTAAGACCGTTGACATTAACAAATGATAAATGTGCAGTAAATTTAAAATCTTGTTTTCTT
GGTGGTTGTTTTCCTTGTATGGGACATACTTCGCTGTCCTTTGGAGCTCCTTTGTGAATT
TCTGTTAAATGTTGTTACATCACTGCATGCAGTTAATGAAGGAAGGGGAGATTACTCCT
GGCATTACCAGTGAAGAATATATGCAGAGAAGGAAGAAATTATTGGAGTTTCTTCCGGA
GAATAGCTTAGCAATTGTTGCAGCCGCTCCCATAAAAATGATGACTGATGTTGTACCAT
ACAATTTTAGGCAGGATGCTGACTATTTGTACATCACCGGATGCCAACAACCTGGTGGT
GTTGCAGTTCTAGGGCATGACTGTGGTTTATGCATGTTCATGCCAGAACAAAGCCCCCA
GGTATTTCAGGAACCATTCACTTGCTTCCTTCTTGTTGACAAGAAGCTGTTAATAAGAGA
AAAGCTTCGTCCTATAATTTAGTGACATTTTTCTTTAGATTCAGTTACTACCATGATTTTT
TGGTAGTTAGTATACATTGTAGCAAGTTAAAGATTGTTTCCATACTAAAAGTGAAAAAGT
ATTTTTAGGACGCTCTTTGGCAAGGAGAAACTGCTGGAGTTGATGCAGCTCTACAGATA
TTCAAGGCTGACCTTGCTTACCCTATTAACAGATTGCCTCAGGTAAATCTTTTTTAAAAT
CATATCTCCAACTGCAAATAAGTTTGAGATTCTTTTTAGAAGCGAATACCTCTCACACTG
ATAAGTAAAAGGGCATATGATAACATCCCTTCTTTTATTCCTTTCAATAGGACAATGAAG
TACTTTATCTAAAAAGGGAGTGGAGACCTATTTGTCTCCTTTCCACTTGATTATAGAAAT
TTATGTCAGAGAATTGAATCTGTTAGAGTTGGCTTGTAGATACCTTTTGACTGTTGATGC
AATTCTTAATATGCGTAAAAGAATTGTTTTTCTCCTTTTTCTCTTTTCTTGCCGGGGAAAA
GAATTGTTTTCCTCCTTTAATATGCGTAAAAGGTATAGAGGGAACAAAGTGGATGGAAG
TTAGAGTTTTCACCTAAGTTGCTCCGACACGGCAATTTAGGTGCCGCACCCATATCGAC
ACGACACTAGTATGGGTGTGGGTATGGGATCCGTACCGGATCTGGTCAAACAATTTTG
GGTACTTTGACCACGACGGATGGAAAAATTCGAGACGAGATACAATTTGATTCCCAAAA
TCAGAATCTAAGGTAAATTTAAATAAAATAATATACCTTATCTAGAAAATCAATCCTTTAC
TTATCTATAACTTGAAAATAAAAAGGAAATCCACACTTTACAAGCTATACGTAAGTAATCC
ACAAAATTTCTCATAATTTAAAAATATTTTTATTTTTTTTGAATTATTTTTAGTCGGATCCC
CGCACCCATATCTGTACTAGGATCTGTATCCCCGAATCTTAGAATTTACATCTCGAAGG
ATCCAACCTCTAGATTCGCACCCATGTCGGACACCCGCACCCGTGTCCGAGCAACTTA
GGTTTTCACATATATAGGAGTCGGGCCTGGCTTATTACTATAAATTCATGTTTGATAGGA
CCTATTACTGGATGTAGCCTTTCCTCATAATTTTGAAAATCAAGCAGGCATCACGCTAGG
ATCGGTTGAGAATATAATATTATGGGTAAGAAATTGAAGAATGAAGGTTAACAGAAAGTG
GACACTGTGTTCCAAATGGAAACTAGGTAAATGATTTAGGCAGACGGAATATTTTTTGGT
TGGCTGTATTTGGCTCTCAGGTTAACCGTTTGACCACTTAATGGTAATTTACTATTTAAA
TCGGCAACACAGAGAACAGGAAGTGAAGATGTATATATGACTGTGTTATTTGTAGAGAA
CCAGTTTATGGTGTAGGTTTTCTAGTTATTGTAGAGCACTTGCGTACAAGAGTTTAAATT
CCGCAACATCGATAAATTCTTACCTTATAAAAAAGAGCAGGAAATGAAGACGAGATGCC
GATATCATGATTAGATCTATGTCAGCAAAGAAAAAATGTCAATTATTTCCTTCTAAGCTGT
CTTTCCTGTACATGGCTTCAATGTAGTGACTTTGTTTCACTTTCTCCATGTTCCAATTTCT
CTTCTCTAATTTTTGCTGGACTTGTCAGATTCTCTCCAGGATGATAGAAAGTTCTTCCAC
TGTGTTCCATAATGTGAAGACAAGGACTTCATCCTACCTGGAGCTTGAGGCCTATAAAA
AAGCAGTTAGCAATTACAAAGTGAAAGATTTCTCTGTGTACACTCATGAAGCCCGATTTG
TGAAGTCTCCAGCAGAGCTGAAATTGATGAGAGATTCTGCATCTATAGCTTGTCAGGTA
ATGGTAGTTCTTTCATTTTTGTCAGGTTCATGGGTTAGAGTGGTAGTTCTTACTCATAGA
GGTTCTTGTTTTTATTGGACATGGAAAAGCAGTCTCTGGGTTATAGAGATGGAAAGATA
GAGTGTACACTTGACACTACTTTTGTATGTTTATTTGTTTTCCATTGAAGTTGATACTCTT
CACACAGTTAACATGTGACTAAGGTATTGATATGCCAGCGAGGTGTTTTCAGAATTTTAA
AAAGCTTATTTGCAGGTCAGCTGTTATACAATCTTAAGTAACATGTTTGTCATTTTGCTAT
ACGACAAAATTTTTTAGAAAGGTAAAATAGGTATTTGCATTTCCCTTTTTTTCCTCTTCTT
CTTTCATGTCTAGGGTGGTGTCTTCAGGTTGAAGATACTACACTTCTGAGGATCTAAAAA
ATATTTCACAAAAGGAAAAAGGGTACAGTCAGATAAAAGGATCACCAGTCTAAAAGAAG
ACGGTTCTTAATATTCCAAAAGTTGGAGTCCCAGCTTTCTTACTTGGGTCAACATATTCT
TGGTCTAATTGTGAAGGAACAGTTCTTGCATGTACAATCCTTTCTTTGATAATGTGCTTC
TGTGTTAAGTAGTTCAGAAGCTCTAGGCATGCTTAACCAAAAGATGTGTATATACTACTC
ATTCATTCTATTTCACAATCATGATTTGCATGTTTTCTTATGAGAGACTGGTCTAGAAAAT
GCTTCTTCCTATTCCTGGATTTGTATGCAGTTGCCTAGCAATAAAGTTGCCAGTTATATG
GGAGTTGAGATATTTTCCTTTCACTAATTCAGTCCTTTTTTATACTGTATAAAGGATATTT
TTTATTTCTTGATCTTTTAATGTCTGTCTTGTCTTTCGGAAACAGCCTCTCTACCCCTCG
GGGTAGGGGTAAGGTCGGCGTACACACTACCTTCCCCAGACCCCACTAGTGGGATTTC
ACAGGGTCGTTGTTATTATTGTTGTTCTTTTAATGTATATATTTTTGGTAGGCACTTGTCC
AGACCATGTTGTACTCGAAGTTGTTTCCTGATGAAGGAATGCTGTCAGCCAAATTTGAA
TATGAATGCAGAGTTAGAGGTGCCCAAAGAATGGCGTAAGCTTTTTCTTGTAATAATTTT
TGGAAGTTTGTATATAGAGAGGAGCACGTTGCAATTTCTAAGTATTTTAGTCTAACATGA
GTTGCAGGAGAGTAAATCAAAATGCCACTAAGACCTCATGTGTAAACATGCAATTGATTT
TCTTTTTCTTCTATTCTCTGCGATTCTGATAATTTGTTGTTTTTCCTGACTGTTAGTTTTG
GTCATACTTCTGGTTGAGATAGTTTCAAGGATTATACATTTTTCTTTTCCTGTTCCACAG
GTTTAATCCTGTTGTTGGTGGCGGACCTAATGGCAGTGTCGTGCATTATTTTCGTAATG
ACCAGAAAGTATGTTTACTGTCTTTAAGCACAGTTGAATTTGAATATCAAGCATATTGAG
TAGTAGTATCTAATTTGTTGTTTTAACAGATTGAAGATGGGGACTTTGTTGTTTTAACAGA
TTGAAGATGGTAACCTTGTCCTCATGGATGTTGGATGCGAGCTCCACGGTTATGTCAGT
GATCTTACTCGTGTTTGGCCGCCCTTTGGAAAATTTTCTTCTGTTCAAGTAAGTATAGAA
TCCATGATTTTCTTCTCCGTTTTCCCCTTAAAACTCAAGTCAAACCCCACTCCTCTGGGT
AAAAACCCTGTTAGCTGATCAAAGTCATAGACAACCTTCCATTTCAGAAAGAATGCACTG
ACCTAAATTGAAACCCCAGACTACCAAAAGCAATCTAGAAAGACAAACGGTAAAATGAA
AATCATCAGGTAATGTAGCCTAGCAGCTAGCTTCACCCTCCAGTGGTATGAGTTATGAA
TCTTAATTCCAGATCCTCAATGGCCTTGCTGATTTGATGTGGATGTGAAGAATGAGAAT
GATATAATCATATAAAGTTCCTCCTTATTAGAAAAACAAAATTTCAATTTTACTTCTAAGC
TACAGATTATGCTTGAGAAATAAATTCTTCCCTTGGTATGGTTTTAAATTGCTACTTTTCT
GTGATATAGTCTCTATACATTATTGTCTGGAACTTAGTGATACGCTCCAAGATACATTTC
AGGAGGAACTTTATAATCTTATTTTGGAGACAAACAAGGAATGCGTGGAGCTGTGCAGA
CCTGGCACAACCATCCGAGAAATACACCACTACTCGGTACTATTTTAGTTAATCCATCTC
GTAATTTCTTTTGGTTTATATTCAAGGGGTAGCTGAGAGTAGGAATTTAATTTTTTTTCTC
TTGCCTTTCATAGACTTAGACCCAGTTATATTGCCAAGTTACATTGGTAGTCTCGGTGAT
AGAAATTTGGGTACAGTTGTGAAGGCCCTACTCTTGCTTTATGTTTTGCCTAATTCTCAA
GTTACACTGACTTCCACCTCCTATTGTGAATAGCAATGTTGCTTCAAAGTTTTCGTTCCT
ATGCATGAGCCGAGGAAAATGAGGCTTGATGGCATTTTCGAAGATAAGGAAAAAAGTTT
AATTCCTTTTAAGCCTTTGAGTATAGAGGTGTTGGGAAGAGATAGATGCCTTTTGATTGC
CCTCCCTTGATTTGAAAATAGTATTTGTTCCCCCATTTCTTCATATATGATGAATAATGCT
TTGTAAAATAAGCCAGTAAGGTAATGATTAGAGGTGTCTAATTAGTGTAGTGTGTGGTAA
TTGATTCTCAGTGAAGGGTAGTATTACCTGGTTGATGCAAATGCTTTATGAATTAAGGGT
CATTCTCTGCATTTGTTGTTAGGGCAGCTGTTAAAGGTCTTATTACTGTTCAAGATATGG
GCGTATATGGTATATATTCTGTAGTGAGTAATTGCCCTATATCAGCATGCTCTTTTCTTTA
GATACTTGAGGACTGCCAAGGTCTCATTCTTTTTTTTTTATTTGATGTGTATAGGTAGAA
ACGCTGCGAAGAGGATTCAAAGAAATTGGGATACTAAAAAATGATCGGCGTGGAAGATA
TGAAATGTTAAATCCTACAAATATAGGTCTTTCCTTTTAACCCTTACTCTTCCGCTGCAG
ATATAAGTACAAATGCATGTGCAATAGCAGCAGAAACCTGCTCCCTCTCAATTGTCTTCA
CAGTTGCTAATGCTATTCCTATTATGCTTTTTGCTGAAAAGAGAAATGATTTCTTGTACC
GCTGCAACCATCTCTGAATGAATTTGGTTTGTTCAATTATATTTCCAGGTCACTATCTAG
GAATGGACGTTCATGATTGTTCTACAATTGGAAATGATCGACCTCTGAAACCTGGTGTA
GTAAGTTTCCTTCCTTACTGATGATTGCTTTGATATTTGAAAATAATCGGGAAACTGCTA
GGTTTGCAAAAGAAATTGGTTGTCATTATTTTGAAATCCTCCTAACGAATGAGGACCAGT
GACTTGCTCATTTGGAAACAAATGAGCTTTGCCATAATGCATCACTCTCTTTTAGCAATT
TACAATGAGTTTTCCTCCATAGGATAGTTCAGTCATTCTCTCTTTGCTTCTTGACTGGAT
TACAATATGAACCAACTAAGAATGCTTATGTTTTTAGAGCCATGTGGTCAAATTTCCCTT
TTCCTTCACTTTTTTCATTTTTATAGAGATGCAAAGGGTTAAAAGAGAGGATTGAATGAT
GATATATATGAATATTTTCTAAACTGCTTTTGTCATATGCACCTCTTTGGTCCTATTGCAG
CTTCTAATTTCATCACTTCTACTAGTAGTTACATGGAGAAAGTTAAATTCAGAAATGAAGT
TGGTTAGGTTACATGGAGAAAATTAAATTCAGAAATGAAGTTGGTTAGGTTTATTTCTAT
TGAAGGATGTGTACATCAGGGTAGTGCGTGTATTTGCATAAAAATTATGTTTGAAATATC
TGACGGTCCAATTAGCAGAAAGATCAAAGTATCTTTTGCTTCTCTCTAGATTCTATATAG
ACCTTTGTTTTGATTGATTAATTTGAAATATTTGAAATGATTAATTCCTCGACCGCTTAGT
TCATTAACCCCGGCTTCATACACGATGCAATTTTTGTTATTGATAAAGGTTTCGTTCCTG
GTATGTCTACTCTTTATCAAAAAGTAAAGCTCTTGTATATCTTTTCATTCTGAGTCACAAG
GAATGTAATATTCCTGCAGAATGTGTAATGTTATATGCAATTGTAGTAAAATTTCTCAGTA
GCTCGCGCATCTTGTTTTCATGTTGGTACTGCAAACTGTTAACTTATACTTTATGTATAAT
CCATTTCATGACAAGTACCTTGCTCTTGTGAAAGGTACTTAACGTCCAACATGCTTGCTT
CCATGTATGAAAAATTATTAGTTATCCCATTTTGCTCCTTTTTCCTTCATTCTTCTAATCAT
AAAAAATTGGAATATGCTCCCGACCTGTCTGATATGACAATAAAAACATACACAATATAT
ATCAAGTCAGCTGTTATATGCAAAATTACTGAAGGTAATTCCAGTAATACAGCTTATTGG
TGTCAGCGGTAGATTTATGTTAAATTATGCTTTAACTGAGGTCTATTTTGCCAGTGATAT
CTGTATCCATGCATTTGTTTTTAGTCCTTACAAAAAACAATTTCAGAACTACTATGTTTTT
GAATAAGAAGCACCATGAACATGCTACTTAGAGGTCTTAGTTTGTATAATTTATGTTGAT
CATATCTGTGGAGAAATATGCTAATTTTGCGTGGGCCGTGGCATTTGTATTTGAAAGAA
GTACATGACTTTTGATTGTTCTGAGATTATGTGCAGAGTCTAGTTCTTTGACTTCGGGAC
TATGGAAAACTTTGTGTTTACTCTACATTCATACATCTAGACAAGGTCATGGCCAATTGC
GAAACATGCTTTACGTTTTTTTAAAAGTGACGGAGACGCATATAGCTCAGAATGATGAG
ATGAAATTGGACAAAGCTAATAGTCTAGGATAAAATTGCCTGGTCATTGTTTAGACATTT
GTAAACTCCTGTTCCCTCTGTTTGTTTCTACATTAACCTTGATGAGGCGGTCATTGATAA
GAAGAATCTCTGACCCCATAAATAGATGAGTCCTTTTCATCTTAGCTTCCAATTACTTGT
GATTTCTGCAAGAACTTGTGATCAATCTTCATGGACTGTTATATGTAGGTCATCACAATT
GAACCAGGAGTATACATCCCTTCATGCTTTGATTGTCCAGAAAGGTAATACTTGTTACCT
CATCAAATTAATGTTCCTTTTGGCATGCATTCAGAAGTTACTGTATCTTAGATCATCCTC
CAGATTCTTGGTTTATTGAACTGGTTCTATCTGCCAAAATGTATTATGGTGGATGGACGA
AGAGTTACTCTTTCATGCAGAAAAGATTGAGAATCATATAAAGATGTCTGTTCTAGGTGG
GTCAGGTAGATCTTGTAGGTCTAGTCAACATGTTAATCTAAGGACATTGTAGCAGAAGT
AGTCGTATCGTGCAAAGGAGTCCCAGTTTGGTTGGGCTTTCAGTGAATGACTGATGGCT
ACTTGTATGTTCAACCGAGAATGGGATCAGGAACCTTTACTTCGAAATTTCTTTTGCAAG
GTTCGAGAAAACTTCCCAGAAACAAATAGCTCGAAAGAAATATGAAAGAAATATTCCAC
GTATCAATGGCATATTCTGGCTGTCCCATTCTAGGGAAAATTGTTGCTTTTGTCATAAAT
CTTAGGGAGAAAGAATTATTGCTCACTTGAACTAAGAAGCTTCATCTGCTGATTCATCTA
TTGTTAAGGAGCTAGATTATTCTCTTACCCCAATAAGGAACAACGTGTCTGTTTCCTTAG
AATTCTTGATTTTTACTCACTTATATATGTCTATATTCACTTATGCTCATTCAGGTTCCAA
GGCATTGGATTTAGGATTGAAGATGAAGTCCTTATTACAGAATCAGGTTATGAGGTATA
GTTACAGAAATCGTTCAATTGTTTGAACAACCGAGTTATACAAGTACCAGTTCATATGAT
CTCTGATACTTTGATCACTTCCGACACTTGTTAGCATTCAAGACCTGATTTTCTGCCCTA
CTGGAAACAGGTACTTACTGCATCCATACCGAAGGAAATTAAACACCTCGAGTCCTTGT
TGAACAACTTTGGCAGTGGGAGAGGAACAGAAATTAGAGCTGCTCTCAGT
SEQ 78
CTACTCACCTCTCACAAAAACCATATAATTCTCCTTCCCTTTCTTCTCTACAAAATCTTCA
TTTCTCTCCAAAAACAAACTCTCATGGCTTCTTCTACTAGAGTTTTTGTTCTTCTCCTTCT
CATAATCTTCAACTTTCTCTACATCTCAGCACAAAAAACCATTAAACATAAGCCTTTTTCA
ATGTCATTTCCTCTTACTTCAACATCTTTATCACATAACTCTTCTTCTAAAGCTCTTTTTCT
TTCTTCCCTTTTGGCTTCTAATCAAAGAAAACAAGCTCCAAACACAAAAACTGTGTCTAG
AATTCCATCTTTGAACTATAAATCAACTTTCAAATATTCAATGGCTTTAATTGTTACACTT
CCAATAGGGACACCACCACAAAATCAACAAATGGTTTTGGACACAGGCAGCCAACTTTC
TTGGATTCAATGTCACAAGAAAATTCCAAAAAGACCCCCACCAACGACGTCGTTTGATC
CTTCTTTGTCCTCCACTTTTTCTGTTCTTCCTTGTACTCATCCTTTATGTAAGCCAAGAAT
TCCCGATTTTACCCTTCCAACTACTTGTGACCAAAATCGCTTGTGCCACTATTCTTACTT
TTATGCTGATGGTACTTTAGCTGAGGGTAATCTTGTCCGTGAAAAAATTACATTTTCACG
TTCCCAAAGTACCCCTCCTTTGATTCTTGGTTGTGCTACGGAGTCCGAAGATGCCGAGG
GTATTTTGGGAATGAATCTTGGACGGTTTTCTTTTGCCTCCCAAGCTAAGGTACAAAAAT
TCTCATATTGCGTGCCAATTAGACAAGGTAGCCATGCAGTTAAACCTAGTGGAACATTTT
ACCTAGGCCAAAACCCTAATTCCCATACATTTCAATATATAAATCTTTTGACTTTTCCTCA
AAGTCAACGCATGCCAAATTTGGATCCACTAGCTTTCACTGTTGGCATGGTAGGGATAA
AAATTGGCGGCAAAAAATTAAACATCTCCGGTAGGGTTTTCCGGCCAAATGCTGGTGGT
TCTGGCCAGACGATCATTGATTCCGGCACGGAATACACTTTCTTAGTGGAAGAAGCGTA
CAATAAGGTCAGAGAAGAAATTGTTAGGTTAGTTGGTCCAAGATTGAAAAAAGGTTACG
TTTATGGTGGTGCACTTGACATGTGCTTCGATAACCGTCCGATGGAAATCGGACGGTTG
ATAGGTGATATGACATTGCAATTTGAGAACGGGGTTGAGATTTTGATCAATAAGGAAAG
GATGTTGGATGAAGTAGAAGGTGGGATCCATTGTGTTGGAATCGGACGGTCAGAATCA
CTCGGAATAGCAAGCAATATTATTGGTAATTTCCATCAGCAAAATTTATGGGTAGAATTT
GATATGAGAAATCGAAGAGTAGGTTTTGGCAAAGGAGAGTGTAGTAGGCAAATG
SEQ 79
ATGGCTGCACTCAATTTCTTCATAATCTTCACATCACTAGTCTTACCAATTGCATCTGAT
CCTCTGTTGTCAACTTATGTTGTCCATGTTGACACCAAAGCCAAGCCATCTCATTACTTA
ACTCAAGATGAATGGTATAATTCAGTGGTTGAGTCAGTTCTTGCAAACAAAATGGACTCA
GATTCTACTTCTCCAAGATTGTTCTACTCATATGATGTAGTGTTACAAGGTTTTGCAGCA
AGATTGACTGATCAAGAATCTGAAAAACTAAATAAATTTCCAGAAGTCATTCACATTTTCA
AAGATCAGTCTAGAATCAAGCTTGACACAACACGTTCGCCGAATTTTCTTGGCCTAAAC
ACAGGTTATGGTCTGTGGCCACAATCTAACTTTGGAGATGATGTTATAATTGGCCTTGTT
GATACAGGGATTTGGCCTGAGAGTGAGAGTTTCAAGGACAATGGTATTGGTCCTATTCC
AACAAGGTGGAAAGGTAAATGTGTTGATGGAATTGAATTCAACGCGACGAGTAGTTGTA
ACAGAAAACTTATTGGTGCTAGGAATTTCGTTAAGGGTGTTGAGAATGACTATCATCATC
AATCGGCACGAGATCAAAATGGACATGGAACACATACTGCTTCAACTGCAGCAGGTACA
GAGGTAAATGGTGCCAATGTATTTGGTTTTGCTAAAGGGAAAGCACGAGGGATTGCGA
GTAAAGCTAGGATTGCAATGTACAAAGCTTGTGGGAGTAGTTCTTGTGCAGAATCTGAT
ATTTTAGCAGCTATTGAAAGTGCTATAAAAGATGGCGTAGACATACTTTCGCTCTCTTTA
GGATACGATGATGCTCCGTTTTATGAAAATCCAGTGGCAATTGCAACATTTGCTGCTGT
TAAAAGGAACATATTTGTTGCTTCTTCAGCTGGAAATCTTGGACCTTATCCATTTTCAGT
TCACAATACAGCACCTTGGGTTACAACAGTTGGAGCTGGATCACTTGATCGCGATTTCC
CCGTTGAAATCAACTTATCAAACAACAAGACTTTTGTTGGTTCTTCTCTTTATCCAGGGA
GAATCAGTGGTAAAAGTTACTCTCTTGTTTATATTGAAAATTGTTCTATAATGACAATCGA
TCGTTCTAAAGTTGAACGAAAGATTGTAGTTTGCAACACTAGTAAAATCGAAGCTCTTAG
AAATGGGATTTTAATTCAGAAAGCAGGTGGTTTTGGACTGATTCAATTAAATCTTCCAAC
TGAAGGAGAAGGGATTAGAGCAATGGCTTACACATTGCCTTCTGCAACATTGGGTTATA
AAGAAGGTATAGAGCTTCTTTCTTATATCAAATCCAATGCTAATCCAAGAGCAGGGTTCG
TACGTCGAAAGGATACAGTAATTGGGAAAAAAGTTAGAGCTCCAATTGTTGCTAGCTTTT
CTTCAAGAGGGCCTAATGTTGTTGTTCCTGAAGTCCTCAAACCTGACCTCATTGCTCCG
GGTTTGAACATTCTTGCTGCATGGCCAGGTAACCAGAGACGGATCCAGGATTTATACCT
TATGCATTCAACCTTTATTCTTTACCATTGACCCCACGACACTTTTAAACTTATGAGGTA
GGAATTTTATACTTTTTGAAATTGTTGTGATTTTTCATATTGCGTGGAAGCAACCACTAAT
GCTTATGGTAGGATAGGCTGTCTACATCACACTCCTTAAGTGCGGCCCTTCGCCCGAC
CCTGCGTGAGCAAGGGATACTTTATGCACTAGTCTACCGCTTTTCTTTATTTAGTGATTC
TTCACATTGTGTGTGTCTATGCAGGTGACATTTCCCCAACACGTCTCAAGATGGATCCA
AGGAGAGTGAAGTTCAATATAAACTCGGGAACATCAATGGCGTGCCCTCACATAGCCG
GAGTAGCTGCATTAGTCCGCGCTGTTCATCCAGATTGGTCCCCGGCTGCTATAAAATCC
GCACTCATGACTACATCCACAGCATTCGACAATGCACAACTCCCTATCATAAAACACGA
AGACATGGAGCTAGCAACTCCGATCAGCATTGGAGCCGGGCACGTGAACCCTGAATCG
GCTATTGATCCGGGCCTAATATACGACACTGATACATCAGACTACATCAACCTACTATG
CAGCTTGAATTACACAGAGAAACAAATGAAACTTTTCACGAACGAGTCAAATCCTTGCTC
GGGTTTCACTGGATCTCCACTTGATCTTAACTATCCATCACTTTCTGTTATGTTCAGGCC
TGATTCCTATGTTCATGTAGTTAAGAAGACACTGACACATGTCGCGGTATCTAAGCCCG
AGGTGTACAAAGTAAAGATAGTGAATCTGAATTCTGAAAAGGTGAGTTTAAGTATAGAG
CCAAGGAAGCTGATTTTCAATGAATCTTTACAGAAACAAAGCTATGTGGTCAAATTTGAG
AGCCATTATGCATTCAACAGCAGCAGGAAAATAGCTGAGCAAATGGCGTTTGGTTCGAT
ATTGTGGGAGAGTGAAAAGCACAATGTTAGGAGCCCCTTCGCTGTTATGTGGGTTCAG
CAAAATTTCAATAACAGTAGATTATACAAA
SEQ 80
TCAAAATGCCAAATCAAATATTTGCTTGTAGTCATCCACAAAGTGTACATCAAGGCCTTC
CTTGACATTAGGAGCAAGCTCGTCAAAATCTCTGCGATTGGCTGAAGGGAATATTATAG
TTTTCACATCACTTCTTCTCGCTGCTATGGCTTTCTCCTTGACCTATTATTGAACCAAAA
GGTAAAGCTTTTGTAAAATCAAGGCACTTCAGAAAAGGAACCCAACACTGGTGGGGTCA
AAAAGAAAAGACCACTCTTATTATGCTTACATGCACATGCATGTAAACACATACACACAG
AGGAAATAATTAAAGCATAAAGAACATTAAAGGCAAAATCAACAAAAAATAAAAAGAAAA
CATGATAGACGATCAGACATAAAAGCTGCATGAGATTATAAGGAGGTGTAAGAATTGTT
AACATACCCCACCAATAGGAAGAATTTTTCCAGTTAGTGTGACTTCCCCTGTCATTGCCA
GGTCCTTTTTAACAGGCTTTTTCATGGCAAGAGACAACAAGGACGTTATCATAGTACAA
CCAGCACTAGGGCCATCCTTGGGGGTAGCACCTGCAGGAACATGAAGATGAAGCTTAC
TATTTGCAAAGAATTGGTTATCAGGCTCCTTTTCCAGCAAAATGGTCCTGGCAACCGTAT
GGGCAATTTGGGCACTTTCTTTCATAACGTCGCCTAGTTGTCCTGTTACATTGAGAGCC
CCTTTCCCTTCTCCTTGCTCCACCAGAGATGTTTCTATATAGAGTGTTGAGCCACCCATT
GAAGTCCAAGCAAGACCCATCACAACTCCAACTGGTGTCTGATCGTATATGCGCTCCG
CATGGAAAACAGGTTTGCCAACATAATCAGCTAGGTTTGGCGAGTCAACAACCACTTTA
TTTACTGTTTTACTCGCTTCACTTTCTGTTGCTTTCTCAGTTTCCTGAGTATCCTGTTAAG
ACCACAACCACTCAGAACCAAAATTCAGTTGCAAAGACACAATAGTCATTATATTAAATG
CAGATAAATATGTAAACATAAAATCATGCAACGCCAAGGAAATACAAGGACATTATTCAT
TAGCAATTTAAATTGGTAGAATTCTATATATTTTTCTTTCAGTACAGACCAATATGAGGGT
AGAAATAACATCAAACATATCAAAATGTATGTGCGCGCGCTAGATTATAACAAGTGAGTT
AACATTTGGCACAACTTCTTAAAACGAATTTGACTATCAAGTCTAATTAGCCAGACTAAA
GAAACCCCTCCATCCCAAAGAATTTGATTAACTGATTACAGTGTATGATATAAATGCAAA
TCATGCATAGATACTTTTTAAGATACAAGGGGGACATAGCATAGAAAATGAATACCAGG
CGCTTCCCTTGCTTGTTCTTAGTTAACATTTCAAAAGAAAGTGCTTCCCCTGCTTGTTTG
GTGTGATATTGCCAGATAAGTGATTTCTTACGTTTTGTTAACCATATTTAATCCAACATGA
GACAGTAAGACAAGTTGTAAAAAGACACTTCTGTGCCTACAAAACTACCTATTACACTGC
ATCTTGTATTTTTATTTTACGCGTAGATAAAACTTAGAAGCACTAAAATACATTGTAGCAT
ACATAATTACAAATAGCAAGAATTACCTGAAGTACTAAACACTATATTTTTGCTTTTTAAT
GTTTTTCATTTACCTGTAAACAAGTATCTTCATTAGCAGACTTCTGCGTTTGATTCTCTGC
TCCCTGTGCTTCAGCTTCAGCATTATTTTCAGAGGCCTCATCATCATTGCTACCGTTTGC
TGACTCAGCTCCAGCTTGAATTTCTTCCTTAGACTTGATTTCGTCTGATAGATGGATAGA
TTCTGCTTTTACCTCATCTACCTCCGCATTCTGAGGCTCAATCTCTCCATCTTCTCTGAC
AAGCTTTAGAGCTATCTGAAAAGCAAGAACAGGATGTGCAAAGTATCAGAGCATGAAAA
CGATTCAAAGTGTTCGTGTTGGATTTCATGAAATAACCATCAGTTTTCATCAAAAGTTGA
CTAGGCACGAGACTCGGACAATTTCATCATTAGATGTGTTATACAAAAGAGGACAGGTC
ACAGAACCTTGCGATAAATTTTTTCAATCTGCTTCTGCAGATTGCGTACACCGGCTTCTC
TGCAGTAATTTTCTATTAAAGCAAGAAGAGCTGAATCGGTCACTTCAACCTGAAATAAAG
AATTCATGAAGCCAAATAAAATTAGCTTATTGCAAGAAACACTTCAAGTGTAACTTGTGA
AATATTTTGAAAAACAACATCAAGGCATCAATTGAAAATCTTTCTACAACCACATATACTA
ACTGCTAGGATAGTTACACGTGTTAAAATATTTAAACCAAACATCAACCATTCAAGGCTT
TGAATTGCAATCAATTGCTAATATAAATCATGCACACTTAATTTTCCAGCTTGATATCACA
TCTTTTTTTTGATAAGGTGAAGATTTTATTAAAAACAGTATCAAGCTGATACTGTAAAAAT
ACAAGGACACTGCTGGCTTAAAAACATTAAAATCCTAAGCGGTCTAGCATGTCCAGCTT
GATATCACATCTCTGCATCTGAGAAACAGCCTCAGCATGTTAAAAGCCTGAGAGACAAA
GAGATGACATATACATGGACTCAAATGTTGCATCTTTTCAACTAGATTACATATCAACTC
GAGTAATTTTACAGGAGCATTAGGGAGCTAGCATTTCCCGAGAAATGGTACCCAAAGCT
CTACCCTAGTCCTGTCATATGTTTGCCATTAGATAAGCATAAAGCCACTACTATGTCATC
AAAAGTACCAACAGCCTCAAGATACTGAAAAAATTAGAACTGCTCCTATCCGCTCTGGA
GGGCCAAAACAAACCAAAGTAGCCATCAGCCCTCCCACATATCAACTTATTAACTTCTG
ACGCCCATATTTAGGGTGGATTTTTTTTTTTTTTTTTTTTTTTTTGGGGGGGGGGGGGGG
GTAGGCACAGTAAATGACACCGCAGATATAGATGAGGTCAAATGTGTCATTTTGATGCC
CTTAATCAGTAAGTATGCAGCTCCCTTTTCTTCACCAGACATCCATATGGCATGTAACTC
AACTGAAGATCACATTAGAGAGCAAAATATAAGATCCACCGAATTCCATTGATCTCATCT
TTAAGGCTGTGGGAGAACATATTTACTGCAGTCATCTTATAACTTAAGCTCCCTCAATAG
ACATTATCAAGTGTTTTTTGGAGTCATCACCACCAATCTTGGCATTGTATGATGATTCCT
TGTACAGTAATAAAACATTCACTACTGTGTACTAGTCTAGTTTTTCTTTTACACGATGGTC
AAATTGAAGTCAACAACAAAAAAAACAAAACACTTGGCATATTTTAAACATCCATCCTGC
TTTAGTCCATGCCACACTCAAATCTGTTAGACAATACCATCCAGCAACCCCAGCCCACC
AGGCACATGTATCCCTACCAGTAAGAAACTCATTATACCTCCATCTACCAATAGAGATTG
GCGACTACCACGACAGATCCACCTTCAATTGCGTTTATATTCCCAGTAAAGTGTGGCAC
AGTGGTTGTGTTAATGATGCACGAGCACATTGGCTAGCAAAGGCAGTCACAGTTTGGCT
CGGTCAAGCAAACATTCCTCAAGAGAAAGCAGCACTTGAGAGGATGTATACAGCAATGT
GGACTCATTCAGTTGTTTATGTGAACCACTTAAATACTTCTTGAAAAGTATAGTGATGGA
AGAGTTTGTATTAAACTTTATAATCCATTAGCTTTGGAGGTAAGTATATTCCAAATGTAGA
GGCTTAAGATGAAAATGATATCAATACATCAAACAGTATATTTCCTAGGAAATATTAAAG
CATATGGCCAAAAACCTATAATGGGATTTACTATATCCGTGCGATTTTTTTCCTTTAGCC
ATGTTCCATATGGAAGGGTGTAAAGAGCTTGATCCCCTGAACTTTCCAATCATATGTTTT
ATTCCATAAACTTCTAACTGAATAAAGCTTTTCACATTTTACTTTAAGAAGTTACATTCTT
GCCCAATCATGTTTCAAACATTTTCCCAACAGACCAATGTCTGCTTCTGAAATGTCAAAA
ATTGGGAGCGGAAAAAATACAAAACTATTCACCCGATAATGAATATGCACAGGAGATGA
TGAAAGAGATGCAACTAGAGACGTTTCTATAAGACATACCTGCTCGGGCTTGATCCCAC
ATGTTTCACGAGTAGCTTTCTCCAAATAATCCCTGGCTATGTGCACTTTCTCATCCGTAA
TGTAACCAGCAATTGAAATTACTTCCATTCTATCCAAAAGAGGATTAGGTATCATTTCTA
CAACATTGGCTGTGCAGACAAACAAAACCTACAGCCGCAAAAAGGAAAATGATCTACCT
CAAATTATGCACTCAAAAAATGGATAATGTGCAGATGTCATTCTCATATAAAGTACAGTG
GAATAGGTAATTGTATTAAGCAAAGAGGATAGAAAACACTGAAGGTGTCAAAGCTCCTT
TTTTTCAAATTTTGGAAGTACATTAAAACCTAGAGGTTGGATTTTATAATTTCTTCAGGTT
CATATATAACTCAACATCCATAACAAGGTTTTGATATAGCCTCCCTCCCCATAACCAAGC
CAGACCCAAAATGCTACTAAAATAATCGAAAGATGCCATCTTCTTTCGACAGAGCCCTTT
GGAAATATAACACAAATATTTACCATTATGAAAAAGACATAGTAACACACAGTAAATTATC
ACATTAAAGGACAAAACAAATGAAATTGTATGCGAATATACCCATCATCCTTCTCTCTCT
AGCCATGTTGTTGATTTGCTGATGTTTGATATAATAAAATGAAATAGTACCGGTAACTGC
AAAGTCGTCATATTTGAATTATGGGCCAAATTCTTTAATCAATAGGTAAACTAACGCTCA
ACACTCAAAGTCTATCGCATAATTGTAAAGTCGTCATATTTGATTTATGGGCCAAATTCT
TTAATCAATAGGCAAACTAACGCTCAACACTCAAAGTCTATCGCTCCAATTATCGGCAAC
TTCAAGAGGAATAAAACCATATCCCTCATCAGTAAAGCCATCAAAGATAATATGAACAGA
CAGTAGGAAATCTCAATGCATCAACCTTTTTCCTATTGAATGATCACCAAAACCAATGCC
AATGAAACCTAGTTTTTCTCAAGTGTTAGATATAGAAATGTAGTTGTCCCACATTGGAAT
AGGTGTAGTATGCCTTTGTATAGAGTAGCTATAAATAAGCCCATCTTGTATTGCATTAGA
CACACAATATCAATATATCATATTTTCTCCCGTGTCTTCTCACATGGTATCAAAGCAATC
GTGAGAGATTTATCGTTGTGCATAAATTCCAGCGACTCCGGGAAGGAAAATCAGTTGAC
CGGAAGCCTTTTCCGGCAGGTCTGCCGCAAGTAAAAAAAAAGCCACTTCGTCAGTGTT
GTGCAAAAAAACCAACACCACCACGAAGTAGATCGGGCTCTGGCAACCAACCCATAAA
AAAATCTCCGTCAGAATACCCTCCACGCGCCGTCACTTGCTACCGGAAGAAAATTTTCC
GGCGAAGTTCCGACGTCGCGTGGGCCACCTTCCAGCCATTTTTTGGCGACGACTCTTC
AGGACAAATTATTCCCCTTGCAATTCCGAGCCTACCCATCCAGGTTACACCAAATTCCA
GACAACTTATATATTTTTTCCAGCATGCATAGTGATTTCAAAAGTGGACTTCCGGCAATT
TTTTGAAAACGTTTCTTCAGAACAGTTGGGTCATCTGGTAATTCCGATCCTACCCCTACT
GTTTTTATTTCATTCCGACCACTTTGAATTTTCCCGGCAGCTACAGTACTATTCCGACTG
CTACAGTAATATTCCGATAGCTACAGTATTTCCTTATTCTGTTTCACTGTTCCTTACTCTG
TTTTAGTGGATTAAATTTGATTATTTCTATAATTTGGTAATAATTTGCAACGATGTCTATG
GGAATTGATGCTTTTGGGTCTAAAAACATGAGTTCTGGAAGCTCTAGTGTTATGATTACT
TCAAAACCTTTAATGTGAGGTTCAAACTACTTAGCTTGGGCTTCATCTGTCGAGTTGTGG
TGTAAAGGTGAAGGTGTTCAAGATCATCTAATTAAACAGTCTAGCGAAGGAGATGAAAA
GGCGATAGCGCTTTGGGCAAAGATTGATGCTCAATTATGTAGCATCTTGTGCCGTTCTA
TTGATTCCAAGTTGATGCCTTTGTTTCGTCCATTCCAGACATGTTATTTGGTTTGGGCAA
AGGCTCGTACCTTATACACTAATGACATATCTCGCTTCTATAATGTGATATCACGGATGA
CAAACTTAAAGAAGCAAGAATTAGATATGTCTACTTAATTGGGTCAAGTACAAGCAATCA
TGGAGGAATTTGAGACATTAATGCCAGTTTCTGCTAGTGTGGCAAAACAACAAGAGCAG
CGACAAAAGATGTTCTAGTTCTTACACTCGCTAGACTTCCTAATGATCTTGATTCAGTGC
GAGACCAGATTTTGGCTAGTCCGACTGTTCCCACAGTTGATGAATTATTCTCTCGATTAC
TCCGCCTTGCCGCACCACCAAGTCACCCAGTGATCTCATCACAAATACTTGATTCCTCT
CTCACATCGCAGACGGTGGATGTTCGGGCGTCTCAAACTATGAAGAACAGAGGAGGAC
GAGGTCGTTTTGGGAGATCTAGACCCAAGTGTTCTTATTGTCACAAACTTGGATACACT
CGTGAAATGTGCTATTCCTTACATGGTCGTCCACCCAAAAATCTTACGTTGCTCAGACT
GAGACTACATGTAACCAAGGTTTTTCTGTATCTAAAGAAGAATATAATGAGCTCCTTCAG
TATCGAGCAAGTAAGCAGACATCTCCACAAGTAGCCTCAATTGCCCAGACTGATACTCC
AGTTGTTGGTAATTCTTTTGCTTGTGTTTCCCAGTCTAGTACTCTTGGACCATGGGTCAT
GGACTCAGGCGCTTCTGATCACATCTCTGGTAATAAATCACTTTTGTCGAATATTGTATA
TTCACAGTCTCTTCCCACTGTTACTTTAGCCAAGGGATGTCAAACTAAGGCACAAGGAG
TTGGACAAGCTAACCCATTGTCTTCTATCACCCTAGATTCCGTTCTTTATGTCCTTGGTT
GTCCTTTTAGTCGTGCATCTGTTAGTCGTTTGACTTGTGCCCTCCATTGTGGTATATATT
TATTAATGATTCTTTTATTATGCAGGACCGCAGTACGGGACAGACAATTGGTACAGGAC
GTGAATCAGAAGGCCTTTACTACCTTAATTCACTCAGTCCTTCCACAACATGTCTAGTTA
CTGATCCTCCGGACCTAATCCACTGTCGTTTAGGACACCCAAGTTTATCCAAACTTCAG
AAGATGGTGCCTCTTTTAGGACACCCAAGTTTATCCAAACTTCACAGTCTACATTAGATT
GTAAGTCGTGTCAGCTTGGGAAACATACCTGAGCTTCCTTTCCGCGTAGTGTTGAGAGT
CATGTAGAGTCTGTTTTCTCCTTGGTTCATTCTGATATATGGGGTCCTAGTAGAGTCAGT
TCAACCTTGGGATTTCGTTATTTTGTTAGTTTCATTGATGATTACTCAAGATGTACTTGGC
TTTTCTTAATGAAAGATCGTTCTGAGTTATTCTCTATATTCTAGAATTTTTGTGCTGAAAT
AAAAAATAAATTTAGTGTCTCTATTTGCATTTTTCGTAGTGATAATGCCTTAGAATATGTA
TCTTCTCAGTTTCAGCAATTTATGACTTCTCATGGAATTATTCATCAGACATCTTGCCTTA
TACCCCTCAGCAAAATGGGGTTGCAGAGAGAAAGAATAGGCACCTTATTGAGACTGCT
CGTACACTTCTAATTGAATCTCGTGTTCCGTTGTGTTTTTGCGGCGATGTAGTTCTCACA
GCTTGTTATTTGATTAATAGGATGCCTTCATCTCCCATCAAGGATCAGATTCCGCTTTCA
GTATTGTTTCCCCAGTCAGCCTTATACCCTCTTCCACCTCGTGTTTTTGGGAGCACATAT
TTTGTTCATAACTTAGCCCCTAGGAAAGATAAGTTAGCTCCTCGTACTCTCAAGTGTATC
TTCCTTGGCTATTCTCGTGTTCAGAAGGGATATCGTTGTTATTCACTTGATCTCCGTAGG
TATCTTATGTCAGCTGACGTCACATTTTTTGAGTCTAAACCTTTCTTTGCTTCTGCTGAC
CACCATGATATATCTGAGGTCTTACCTATACCGACCTTTGAGGAGTTTCCTATAGCTCCT
CCTCCACCTTCGAACACAGAGGTTTCACCCATACTAACCATTGAGGAGTCTAGTGTTGT
TCCTCCTAGTTCCCCAGTCACAGGAACATCACTCTTGACTTATCATCGTCGTCTGCGCC
CTACATCAGGCCCAACTGGTTCTCGTCCTGCACCTAACCCTGCTCCTACTGCGGACCC
TGCTCCTAGGACACTGATTGCACTTCGAAAAGGTATACGGACCACACTTAACCCTAATC
CTCATTATGTTGGTTTGAGTTATCATCGTCTGTCATCTCCCCATTATGTTTTTATATCTTC
TTTGTCCTCGGTTTCCATCTCTAAGTCTACAGGTGAAGCGTTGTCTCATCCAGGATGGC
GACAGGCTAGGAGTGATGAGATGTCTGTTTTACATACAAGTGGTACTTGGGAGCTTGTT
CCTCTTCCTTCGGGTAAATCTACTGTTGGCTGTCGTTGGGTTTATGCGGTCAAAGTTGG
TCCCGATGGCCAGATTGATCGACTTAAGGCCCATCTTGTTGCCAAAGGATATACTTAGA
TATTTGGGCTCGATTACAGTGATACCTTCTCTCTTGTGGCTAAAGTGGCATCAGTCCGC
CTTTTTCTATCCATGGCTGCGGTTCGTCATTGGCCCCTCTATCAGCTGGACATTAAGAA
TGTCTTTTTTCACGGTGATCTTGAGGATAAGGTTTATATGGAGCAACCACCTGGTTTTGT
TGCTCAGGGGGAGTCTCGTGGCCTTGTATGTCGCTTGCGTCGGTCACTTTATGGTCTTA
AGCAATCTCCTCGAGCCTGGTTTGGTAAGTTCAGCACGGTTATCCAGGAGTTTGGCATG
ACTCGTAGTGAAGCTGATCACTCTGTATTTTATCGGCACCCTGCTTCAAGTCTATGTATT
TATCAGGTAGTCTATGTTGATGATATTGTTATTACTCGCAATGATCAGGATGGTATTACT
AATCTGAAGAAGCATCTCTTCCAGCATTTTCAAACTAAGGATCTAGGCAGATTGAAGTAC
TTTCTAGGTATTGAGGTTGCTCAATCTAGCTCAGGTATTGTTATTTCTCAAAGGAAATAT
GCTTTAGACATTCTTGAGAAGATAGGGATGATAGGTTGCAGACCTGTTGATACTCCAAT
GGATCCGAATTCTAAACTTCTGCCAGGACAGGGGGAGCCGCTTAGCGATCCTGCAAGC
TATAGGCGGTTGGTTGGTAAATAAAATTATTTCACAGTGACTAGACCCGACATTTCTTAT
CCTGTGAATGTTGTAAGTCAGTTTATAAATTCTCCCTATGATAGTCATTGGGATGCAGTC
GTCCGCATTATCCGGTATATAGAATCGGCTCCAGGCAAAGGATTACTGTTTGAGGATCG
AGGTCATGAGCAGATCGTTGGGTACTCAAATGCTGATTGGGCAGGATCACCTTCTGATA
GACGTTCTACGTCTGGATGTTGTGTTTTAGTAGGAGGAAATTTGGTGTCCTGGAAAAGC
AAGAAACAGAATGTAGTTGCTCGGTCTAGTGCAGAAGCAGAATATCGAGCAATGGCTAT
GGTAACATGTGAACTAGTCTGGACCAAACAATTGCTCAAGGAGTTGAAATTTGGTGAAA
TCGGTTAGATGGAACTTGTGGAACTTGTGTGCGATAATCAAGATGCCCTTCATATTGCA
TCAAATCTGGTGTTTCATGAGAGAACTAAACACATTGAGATTGATTGTCACTTCGTAAGA
GAGAAGATACTTTCAGGAGATATTACTACGAAGTTTGTGAGGTCGAATGATCAACTTGC
AGATATTTTCACCAAGTCCTTCACCGATCCTTGCATTGGTTATATATGTAACAAGCTCGG
TACATATGATTTGTATGCTCCGGCTTGAGGGGGAGTGTTAGATATAGATATGTAGTTGC
CCCACATTGGAATAGGTGTAGTATGCCCTTTGTATAGAGTAGCTATAAATAAGCTCATCT
TGTATTGCATTAGACACACAATATCAATATATCATATTTTCTCCCGTGCCTTCTCACATCA
AGTATCAAGAGAACAACATTCTACTTACGCTAATCTTATTACAGTCATAAAGACAGAGAC
AAAGGTAACACAGACGTGAAATAAAATACTTCCAGATAACCTTTCATTATGGACAATAAA
AGAAACATGTTCAGTCACGAAACTTTTTCCAAACTTAATTAAGGTAAGAGACGAAAGAAA
ACATCAATCAGTAAAGAAAAAGAAGGGGAAATTAAAAGGTGAAAAAGCAAAATGATATTA
GATATTTGCAAGATTTTTAATATCACATTAGTCCCCACTCATCAAATGATGGTAGAGGGC
ATTTCATAAGGGCCAATCAACAGCCACAACAATTCGATAAGTGCTCCAGGAAACAACTA
ACCTTTGATAAATCAATAGGAACATCAAGATAATGATCTAAGAAATTTGCATTCTGTTCT
GGATCAAGAAGCTCCAACATAGCACTTGCTGGATCACCAGCATGTCCTCTTCCCAACTG
CCATAGAAGAAAAAATACAAAGCTATTATTAAATTTGATCGATAATTATACACATTCTTTA
AACATTTAGATTGCAGAAGAAATCCAAGCAAAAACATAATATGTTAATGCCCAAGATTCT
TCCGGTGGTCATACACAGAAAAGCAAGATTTAAATAGTGGAAAAGAAGTTACACTTCAC
TCATAGTCAAAGCATATAATTGAAGTATGAACTCACAAACCATAAAATACCTTGTCAATTT
CATCGATCAAAACAAGAGGATTAGCGGTTCCCACACTTTTTAAACATTGCACCATCTTCC
CCGGCATGGCACCAATATAAGTTCGTCGATGTCCCTTGAAGTGTATCCCAAAGTTAGTC
ATGAAAGTTCAAGATTATGTGCACAACAAAACAACTCTGTTTTAGCTGGTTAGATATTTC
TGTTACCTTTATTTCAGCAACATCAGACAGCCCTCCAACAGAAAATCGGTAAAATTTGCG
GTTCAATGCACGTGCAATTGAACGACCTATACTGGTTTTGCCCACCCCAGGAGGGCCA
GAGAGGCATATGATTTTCCCTGTTCAAACAAAAATAAGCAATGAGTTTGTTTAGTTCCTG
ACTCAGATTCACAAATTAAACTGAGATAAATCAGATAAAGCCGCACATATGAAAGACAGT
GCCAGTGTATAATTGCGATTAATATCATCACTTGAATCTAACATTGTCCTAGCTATGGTG
CAATTCACATTTTTCTAGAGTTGCCCTTTGTCTGTTTTTTCCTCAACACTTCATAGTTTTC
AAAGATTTTCCTCAACAAACAACTACATCTCAAGTTCAAATGTCCCAAAGATATACAAGT
ACAACTGGCAGTGAAAGTAAGTTATCAATAAAATACCATAGAGCGAGTGCCCAATCATG
GACAACACAATATCAGAATTTAAGAAGAACACCAACAAAGTATGGCCCAAGGTGCAGCT
ATTTAACTCACATTAATTGCTTTTCAAGGGAAGAAATTAAGCTCAAGATATATTTCTTTAC
TCCACAGATAATCACAAGAAAACATTGGAGGAACTCTCGACTGTCACAAAAAGTATTAC
CTAAGTTTGACCAATAAATATTTCTCAAATGCCCTAAAATGTTCACTTCTTCCAATTTACT
CGTTCCAATTTGATGTCAATATAGTATGTGGGAACCATAAATCCCATGTTCTATGGATAT
ATTTTCCATTGGTATATTATAATGTTATGAAAATGGACGGTAAGGAGATGGCTGGATCAT
TTTCCGTTCTTTTAATATGATTATAGCTGAACCTTATAAAACTGAGGATTTTATTAAAAAT
GAGGGTCATTATTTTTAAAAAATAAGGCATTTACCAACCTTGTGAGGTTCCTCTGAGTTT
TCCCACAGCTATAAATTCCAAGATCCTTTCCTTAACATCGGTTAACCCATAGTGGTCTTC
ATCAAGAATTTGTTCTGCCCGTAGTACATCAAAGTTTTCATCACTGCATTTTGGATCATA
AAAGAAGAAAAGTTCAGGAACCAATGCAATACACCCAGGCAGAGATCAAAACTATAAAG
CCAACACCACCACCATCAGCAGCAAACAACACGAACTATGACAAATCAAGCCCCCATCT
TAACCTACATAAGGAGCTCATCATAAGTACAATCCTAGTTTTGCTGCTCTCATGAGATCC
TGGTCTAAACTGATACATTGGGATGTCAAGGAAGCATCCTCAAAGCCAGAAGCATGACA
TGTAAGAACCCAAAATAAGGAACAGGAGGAGAAAGAAAAGTTAAAGACAAATGGATATT
ACTCGATAGAAATTTAGGCAAGTCACATCACTAGGCAGTAAGGTTAACTTGGAAGCCTA
GCAAATTTCAGACAATAACAATTTTATTTCTCATAACTGTTTAGCCAGCTTCTAACAAACA
GATTCCTCTAGTACAGCTAACCAAGGATAAGGTTAACATCAGTTGGATTGAACCCAAGA
CAATGTAAGGTAGAATAGATAGACAACAAACCTGTAACTACCCCATGGCAAGGCAGTCA
ACCAATCAAGATAATTACGTGTCACGTTAAATTCACTGGAACTAGCTTCCAACAGTTGCA
GTTTTGTCAGTTCTTCTTCAATAACTTGCATAACATGTACTGGTATTTTTTCTTTATTAGG
CTCCAATCTTTCCCTGAACTTTGCTGCAGTAATAAACAAATATAGTGTCACACCATTAGA
TGTAATTAAAAAGGGAACAAAAAACTGCAGGTTTCCCTTAGTATTGACCAGAAAAATCCA
AGCCCTTAAAGCGAACCTAATCATTAGGCAGTTTCTTCTCTCAATTTCAACACCAAAACC
AGGTCTACCAAAACAATGCTACAATGCGGAGCTCAACTTTATCTTTGTGAAAATTATAGA
GAAAAAATAATGAGAACCGCATTTTAGGGTTTGCAGTAACGTCTATTATCACCAAAACCT
GGAAGAAGCACCTTCTTAAGCATCACACTCCTCAACAGGAGCAAAGGAGAGAAGAAAG
AGCACATAACAGAAAAAGCAAGTAGGCTTCTAATTAGGAAGTGCACTGAAGGGAAACAG
GACAGAATTCATGAGAAAAAGAAGACATTGGAGGAGGAAGATAATCTGAATCATGAGCA
GTCCATAACATGAATAAACAACAATGCAGTGCTAAAACGGAAAATGTGGCCTTCCAGTA
AATCCATGTTGAATTTGTGCCACATTACCAAATATGGTAGACAGTAACCTTTCGGAATTG
AAGTTGAAGGATTCCAGTATTGTCTTATTAAGTGCTTTCGTGAAAACACAAAACAGCCCC
CTATAGGTACAATGTATTCTAATCTGTCAAAAGTTTGGAATGTCTCAAATAGTTTTAGAAA
GCATGTCAATAAAGTTGGTTGGACTGTGTACAAAGAAAATTCAACCTTCAATTTCCTATA
TGTAAAGCCAATTATCGCTTGAATGCTATTCATGCTTCTAGTGAAGATTTTCAATGGTAA
ACAGGAGATCAATCAGCCACCATAAAACTTTTACAACAGAAAGGGCAAAACATATTGCA
AATGGCCTTTTCTATGCTACTGCTAAATGGAACTTTACCAGGGACAACATAAGATGTTTC
ACTGGCCAGATGGGAAAACACGTCTGGCCATAATAAATCCAAAAAGAACATTATCCATT
TCAATAATAATTAAGAGACAACTAACCAGAAAGAGCTGTCTTGTCATCAGTCTCCAAACC
TAGTTCCTGCATTAAGCCAATCAAAACCACGTCATAAGTACTTTTTTTTCAAATCAACTCT
TTGTTTAAACTGTGAATCAAACATAAGAACCAGAAGCTTAACATATATATTATCTAGGAAT
AAACATATGTAAGTACTAAGTTTAAGGATGATAACACAAAAAAAGCTGCACATAATCCAC
ATGCCTTCTTTATGGCCTTTAATTGTTCATTCAACAAATAACGGCGTTGCTCTCCGCTTA
TTTTTTCTTCAATTGCTCTTGCTATTGATTCCTGCAGAAAACAAAGACGACGTAAAATGC
TAAATGCATGCATAACAACTATTCAAAGTTCTGGTATGCGTCTTGACGTGCATTTACCTG
AATCTTACTAATCTCCAT
SEQ 81 to 160 are putative protein SEQ related to SEQ 1-80
SEQ 81
MALRFSLIFLFSLFLTTSLLLSVNGNINGGEDDDILIRQVVGDDDDHLLNADHHFTIFKRRFGKTYA
SDEEHHYRFSVFKANLRRAMRHQKLDPSAVHGVTQFSDLTPAEFRRNFLGVNRRLRLPSDANK
APILPTEDLPSGFDWRDHGAVTSVKNQGSCGSCWSFSTTGALEGATYLSTGKLVSLSEQQLVD
CDHECDPEEKDSCDAGCNGGLMNSAFEYTLKAGGLMREEDYPYTGTDRGTCKFDNTKVAAKV
ANFSVVSLDEEQIAANLVKNGPLAVAINAVFMQTYVGGVSCPYICSKKLDHGVLLVGYGTGFSPI
RMKEKPYWIIKNSWGEKWGENGYYKICRGRNVCGVDSMVSTVSAVSTSSH
SEQ 82
MGAKVFLVALFLSALLFPLASSSNDGLMRIGLKKMKFDQNNRLAARIESKEGDVLRASIRKYNFR
GKLGDSEDTDIVALKNYMDAQYFGEIGVGTPPQKFTVIFDTGSSNLWVPSSKCYFSVPCFFHSK
FKSSESSTYKKNGKSAAIQYGSGAISGFFSQDNVKVGDLVVTDQEFIEATREPSVTFLVAKFDGIL
GLGFQEISVGNAVPVWYNMVQQGLIKDPVFSFWLNRNTEEEQGGEIVFGGVDPNHYKGEITYV
PVTHKGYWQFDMGDVLIEGKATGYCESGCSAIADSGTSLLAGPTTIITMINQAIGASGVASQQCK
SVVEQYGQTIMDLLLAEAHPKKICSQVGVCTFDGNRGVSMGIESVVDEKAGRSTGLQDGMCSA
CEMAVIWMENQLRQNQTQDRILNYVNELCERLPSPLGESAVDCGKLSSMPTVSFTIGGKVFDLV
PKEYILKVGEGAKAQCISGFTGLDIPPPRGPLWILGDVFMGRYHTVFDYGKLRVGFAEAA
SEQ 83
MGSFLCFSVIVVLLVLQPCLAKKVYIVHMKNHQIPSSFATHHDWYNAQLQSLSSSSTSDESSLLY
SYDTAYSGFAASLDPHEAELLRQSDDVVGVYEDTVYTLHTTRTPEFLGLNNELGLWAGHSPQEL
NNAAQDVVIGVLDTGVWPESKSYNDFGMPDVPSRWKGECESGSDFDPKVHCNKKLIGARFFS
KGYQMSASGSFTNQPRQPESPRDQDGHGTHTSSTAAGAPVANASLLGYASGVARGMAPRAR
VATYKVCWPTGCFGSDILAGMERAILDGVDVLSLSLGGGSGPYYRDTIAIGAFSAMEKGIVVSCS
AGNSGPAKGSLANTAPWIMTVGAGTIDRDFPAFATLGNGKKITGVSLYSGKGMGKKVVPLVYST
DSSASLCLPGSLDPKMVRGKIVLCDRGTNARVEKGLVVKEAGGVGMILANTAESGEELVADSHL
LPAVAVGRKLGDFIRQYVKSEKNPAAVLSFGGTVVNVKPSPVVAAFSSRGPNTVTPQILKPDVIG
PGVNILAAWSEAIGPTGLEKDTRRTKFNIMSGTSMSCPHISGLAALLKAAHPEWSPSAIKSALMT
TAYVRDTTNSPLRDAEGGQLSTPWAHGSGHVDPHKALSPGLIYDITPEDYIKFLCSLDYELNHIQ
AIVKRPNVTCTKKFADPGQINYPSFSVLFGKSRVVRYTRAVINVGAAGSVYEVTVDAPPSVTVTV
KPSKLVFKRVGERLRYTVTFVSKKGVNMMRKSAFGSISWNNAQNQVRSPVSYSWSQLLD
SEQ 84
MGTKFILFILLFIFLFSSGFVACGGFYSFRNLNSSVSGIEFPNHPSFNAVSSSADSDCNYGVSQKS
KTHSIAQEVDGVDVKNGENEEVSIFGNQKKEAVKFQLRHRSAGKKIEAKDSVFESRARDLSRIQT
LHTRIVEKKNQNYNSRLAKSNEKHVDKHKPVIAPAAVSLESYELSGKLMATLESGVSLGSGEYF
MDVFVGTPPKHFSLILDTGSDLNWIQCVPCFDCFEQNGPHYNPQDSTSFRNISCHDPRCKFVTS
PDPPQLCKSENQTCPYYYWYGDSSNTTGDFALETFTVNLTTTSGSEFRKVENVMFGCGHWNR
GLFHGAAGLLGLGRGPLSFASQLQSLYGHSFSYCLVDRNSNSSVSSKLIFGEDKELLKHPQLNF
TSLVGGKEVETFYYVQIKSVIVGGEVLNIPEETWNLSLEGLGGAIIDSGTTLSYFADPAYEIIKEAF
VNKVKGYPIVQDFPILNPCYNVSGVKNLEFPSFGIVFGDGAVWNFPVENYFIKLEPEDIVCLAVLG
TPRSALSIIGNYQQQNFHILYDTKRSRLGYAPTRCADA
SEQ 85
MALTLKSLATPLLFGALFILILQVVAEQPISEAKVESAILQESIIKEVNENAKAGWKAAFNPRFSNFT
VSQFKRLLGVKPAREGDLEGIPILTHPKLLELPKEFDARKAWPQCSTIGRILDQGHCGSCWAFGA
VESLSDRFCIHHNLNISLSVNDLLACCGFLCGSGCDGGYPITAWRYFIRRGVVTEECDPYFDNE
GCSHPGCEPGYPTPKCQRKCVKEILLWGKSKHYGVNAYRIHHDPNSIMTEIYKNGPVEVSFTVY
EDFAHYKSGVYKHVTGQSMGGHAVKLIGWGTSEQGEDYWLIANSWNRGWGDDGYFKIRRGT
NECGIEHNVVAGLPSAKNLNVELDDVSNAFLDASM
SEQ 86
TLVLHTSFYLLLSVASPGDCLLLSIFPFSFSSPRYFPYKQNTVKIISSNFLFSPFFQMGSFLCFSVIV
LFLVFQPCFSKKVYIVHMKNHQIPSSFATHHDWYNAQLQSLSSSSTSDESSLLYSYDTAYSGFA
ASLDPHEAELLRQSDDVVGVYEDTVYTLHTTRTPEFLGLNNELGLWAGHSPQELNNAAQDVVIG
VLDTGVWPESKSFNDFGMPNVPSRWKGECESGPDFDPKVHCNKKLIGARFFSKGYQMSASGS
FTNQPRQPESPRDQDGHGTHTSSTAAGAPVANASLLGYASGVARGMAPRARVATYKVCWPTG
CFGSDILAGMERAILDGVDVLSLSLGGGSGPYYHDTIAIGAFSAMEKGIVVSCSAGNSGPAKASL
ANTAPWIMTVGAGTIDRDFPAFATLGNGKKITGVSLYSGKGMGKKVVPLVYSTDSSASLCLPGS
LDPKIVRGKIVLCDRGTNARVEKGLVVKEAGGVGMILANTAESGEELVADSHLLPAVAVGRKLG
DFIRQYVKSEKNPAAVLSFGGTVVNVKPSPVVAAFSSRGPNTVTPQILKPDVIGPGVNILAAWSE
AIGPTGLEKDTRRTKFNIMSGTSMSCPHISGLAALLKAAHPEWSPSAIKSALMTTAYVHDTTNSP
LRDAEGGQLSTPFAHGSGHVDPHKALSPGLIYDITPEDYIKFLCSLDYELNHIQAIVKRPNVTCAK
KFADPGQINYPSFSVLFGKSRVVRYTRAVINVAAAGSVYEVVVDAPPSVLVTVKPSKLVFKRVG
ERLRYTVTFVSNKGVNMMRKSAFGSISWNNAQNQVRSPVSYSWSQLLD
SEQ 87
MASSCLHAILLCFLLFITSTTAQNQTSFRPKGLILPITKDASTLQYLTQIHQRTPLVPVSLTLDLGGQ
FLWLDCDQGYVSSSYKPARCRSAQCSLAGAGSGCGQCFSPPKPGCNNNTCSLLPDNTITRTAT
SGELASDTVQVQSSNGKNPGRNVTDKDFLFVCGATFLLEGLASGVKGMAGLGRTIISLPSQFSA
EFSFPRKFAVCLSSSTNSKGVVLFGDGPYSFLPNREFSNNDFSYTPLFINPVSTASAFSSGEPSS
EYFIGVKSIKINQKVVPINTTLLSIDNQGVGGTKISTVNPYTILETSIYNAVTNFFVKELVNITRVASV
APFGACFDSRNIVSTRVGPAVPSIDLVLQNENVFWRIFGANSMVQVSENVLCLGFVDGGVNPRT
SIVIGGYTIENNLLQFDLAGSRLGFTSSILSRLTTCANFNFTSIT
SEQ 88
MNPEKFTHKTNEALAGAHELALSAGHAQFTPLHMAVALISDHNGIFRQAIVNAGGNEEVANSVE
RVLNQAMKKLPSQTPAPDElPPSTSLIKVLRRAQSSQKSCGDSHLAVDQLILGLLEDSQIGDLLKE
AGVSASRVKSEVEKLRGKEGRKVESASGDTTFQALKTYGRDLVEQAGKLDPVIGRDEEIRRVVR
ILSRRTKNNPVLIGEPGVGKTAVVEGLAQRIVRGDVPSNLADVRLIALDMGALVAGAKYRGEFEE
RLKAVLKEVEEAEGKVILFlDElHLVLGAGRTEGSMDAANLFKPMLARGQLRCIGATTLEEYRKYV
EKDAAFERRFQQVYVAEPSVTDTISILRGLKERYEGHHGVKIQDRALVVAAQLSSRYITGRHLPD
KAIDLVDEACANVRVQLDSQPEEIDNLERKRIQLEVELHALEKEKDKASKARLVEVRKELDDLRD
KLQPLMMRYKKEKERIDELRRLKQKRDELIYALQEAERRYDLARAADLRYGAIQEVETAIANLES
TSAESTMLTETVGPDQIAEVVSRWTGIPVSRLGQNEKEKLIGLGDRLHQRVVGQDHAVRAVAEA
VLRSRAGLGRPQQPTGSFLFLGPTGVGKTELAKALAEQLFDDDKLMIRIDMSEYMEQHSVARLI
GAPPGYVGHDEGGQLTEAVRRRPYSVVLFDEVEKAHPTVFNTLLQVLDDGRLTDGQGRTVDFT
NTVIIMTSNLGAEYLLSGLMGKCTMETAREMVMQEVRKQFKPELLNRLDEIVVFDPLSHEQLRQ
VCRYQMKDVALRLAERGIALGVTEAALDVILSESYDPVYGARPIRRWLERKVVTELSKMLVKEEI
DENSTVYIDAGVGRKDLTYRVEKNGGLVNAATGQKSDILIQLPNGPRSDAVQAVKKMRIEElEED
EMED
SEQ 89
MQSFKSASILRRLLQNSRLVSHSRSFCSVSTNALVDESQSTVLVEGKASSRTAILNRPHALNALN
FSVVDRLLKLYKNWEDDPDIGFVVLKGSGKAFSAGGDIVTIYNLLKQDAGNLQDCKDFCWTINNL
VYVVGTLLKPHVALLNGITMGGGAGISIPGTFRVATEKTVFATPETLIGYHPDAGASFYLSHLPGY
LGEYLALTGDKINGAEMISCGLATHYLHSAKLPLIEEQLGKLMTDDPSVIERSLENCGEIVHPDPT
SVLHRIETLNKCFSHDTVEEIIDALESEAAKKQDAWCVSTLRKLQETAPLSLKVSLRSIREGRHQT
LDQCLIREYRMSVQAFSGQITNDFCEGVRARLVDRDFAPKWDPPSLDKVTDDMVDQYFSRLTA
FEPELELPTQQREAFT
SEQ 90
MALTLKSLATPLLLGAFFILVLQVVAEKPISEAKVESAILKESIIKEVNENAKAGWKAAFNPQFSNF
TVSQFKRLLGVKPAREGDLEGIPLLTHPKLSELPKEFDARKAWPQCSTIGRILDQGHCGSCWAF
GAVESLSDRFCIHHNLNISLSVNDLLACCGFLCGSGCDGGYPISAWRYFIRRGVVTEECDPYFD
NEGCSHPGCEPGYPTPKCQRKCVKENLLWGKSKHYGVNAYRIHRDPYSIMTEIYKNGPVEVSF
TVYEDFAHYKSGVYKHVTGQSMGGHAVKLIGWGTSEQGEDYWLIANSWNRGWGDDGYFKIRR
GTNECGIEHNVVAGLPSAKNLNVELDDVSDAFLDASM
SEQ 91
MGVLKKTLLLLFLCVFLGDISLCFSSKLYVVYMGSKDSDEHPDEILRQNHQMLTAIHKGSIEQAKT
SHVYSYRHGFKGFAAKLTEAQASEISKMPGVVSVFPNTKRSLHTTHSWDFMGLSDDETMElPG
FSTKNQINVIIGFIDTGIWPESPSFSDTNMPPVPAGWKGQCQSGEAFNASICNRKIIGARYYMSG
YEAEEENGKTMFYKSARDSSGHGSHTASTAAGRYVANMNYKGLANGGARGGAPMARIAVYKT
CWSSGCYDVDLLAAFDDAIRDGVHVISLSLGPDAPQGDYFNDAISVGSYHAVSRGILVVASVGN
EGSTGSATNLAPWMITVAASSTDRDFTSDILLGNGVRLKGESLSLSQMNTSTRIIPASEAYAGYF
TPYQSSYCLDSSLNRTKAKGKVLVCLHAGSSSESKMEKSIIVKEAGGVGMILIDDADKGVAIPFVI
PAATVGKKIGNKILAYINNTRLPMARILSARTVLGAQPAPRVAAFSSRGPNSVTPEILKPDIAAPGL
NILAAWSPAASTKLNFNVLSGTSMACPHITGVVALLKAVHPSWSPSAIKSAIMTTAKLSDKHHKPII
VDPEGKRATPFDFGSGFVNPTNVLDPGLIYDAQPADYRAFLCSIGYDEKSLHLITRDNSTCDQTF
ASPNGLNYPSITIPNLRSTYSVTRTVTNVGKARSIYKAVVYAPTGVNVTVVPRRLAFTRYYQKMN
FTVNFKVAAPTQGYVFGSLTWRNKRTSVTSPLVVRVAHSNMGMMV
SEQ 92
MGAKAFLVAMFLSALLFPFASSSNDGLMRIGLKKMKFDQNNRLAARIESKEGDVLRGSIRKYNF
RGKLGDFEDTDIVALKNYMDAQYFGEIGVGTPPQKFTVIFDTGSSNLWVPSSKCYFSVPCFFHS
KYKSSESSTYKKNGKSAAIQYGSGAISGFFSQDNVKVGDLVVTDQEFIEATREPSVTFLVAKFDG
ILGLGFQEISVGNAVPVWYNMVKQGLIKDPVFSFWLNRNTEEEQGGEIVFGGVDPNHYKGEITY
VPVTQKGYWQFDMGDVLIDGKATGYCESGCSAIADSGTSLLAGPTAIITMINQAIGASGVASQQC
KSVVEQYGQTIMDLLLAEAHPKKICSQVGVCTFDGNRGVSMGIDSVVDEKAGRSTGLQDGMCS
ACEMAVIWMANQLRQNQTQDRILNYVNELCERLPSPLGESAVDCGKLSSMPKVSFTIGGKVFDL
SPNEYILKVGEGAKAQCISGFTGLDIPPPRGPLWILGDIFMGRYHTVFDYGKLRVGFAEAA
SEQ 93
MTFFRSFLFFLLTLFVISSALDMSIISYDEQHGQMGTTHHRTDDEVRELYESWLVKHGKNYNAIG
EKERRFEIFNDNLRFIDEHNAENRSYKLGLNRFSDLTNEEYRAMFVGGRLDRKTRLMKSPKSNR
YAFQAGEKLPESVDWREKGAVAPVKDQGQCGSCWAFSTVGAVEGINKIVTGELISLSEQELVD
CDRSYNQGCNGGLMDYAFDFlKNNGGIDTEDDYPYHAQDGTCDPYRKNARVVSIEGYEDVPEN
DEKSLMKAVANQPVSVAIEGGGRAFQHYSSGVFTGYCGTQLDHGVVVVGYGTENGEDYWIVR
NSWGANWGESGYIKLQRNFANSTTGKCGIAMQASYPLKSGANPPNPGPSPPTPVTPSTVCDEY
YSCPQGTTCCCIYQYGEYCFGWGCCPYESATCCDDNYSCCPHDYPVCDVDAGTCLMSKDNPL
KVKALKRGPARVNWSGMKSNRKVSYV
SEQ 94
MANSYTSFNFFLAPIIFLAILGLQLQSSDGFGTFGFDIHHRYSDPVKGILDLHGLPEKGSVEYYSA
WTQRDRFIKGRRLADTTNPTPLSFSGGNETFRLSSLGFLHYANVTVGTPGLSFLVALDTGSDLF
WLPCDCSNCVRALETRSGRRINLNIYSPNTSSTGQIVPCNGTLCGQRRRCLSSQNACAYGVAYL
SNNTSSSGVLVEDILHLETDNAQQKSVEAPIALGCGIRQTGAFLSGAAPNGLFGLGLESISVPSM
LASKGLAANSFSMCFGPDGIGRIVFGDKGSPDQGETPLNLDQLHPTYNISLTGITVGNKITDVDFT
AlFDSGTSFTYLNDPAYKVITENFDSQAKQLRIQPDGEIPFEYCYGLSANQTTFEVPDLNLTMKG
GNQFFLFDPIIMLSLQDGSRAFCLAVVKSGDVNIIGQNFMTGYRVVFDREKMVLGWKPSDCYDS
RESNDKSTTLPVNKRNSTEAPSPSSVVPEATKGNGSGNEPATSFPSVPSSRPAINHAPAHFNSY
ICQLMMALFSLFSYYLIIVSS
SEQ 95
MVTKFSIFILVVLLRLFSFGSVASREIHNSGLNLNSSASGIEFPQHPSFNSVTASGNSDCSYGTSK
KSTTTHVITQEENRSDEKEDEDLMVSKNQPREAVKFHLRHRSAGQNIEAKDSIFESTTRDLGRIO
TLHTRIVEKKNQNSISRQTKNSEKPTQSSSFEFSGKLMATLESGVSHGSGEYFMDVFVGTPPKH
FSLILDTGSDLNWIQSVPCYDCFEQNGPHYDPKDSISFKNISCHDPRCHLVSSPDPPQPCKSEN
QTCPYYYWYGDSSNTTGDFALETFTVNLTTPSGDSEIKKVENVMFGCGHWNRGLFHGAAGLLG
LGRGPLSFSSQLQSLYGHSFSYCLVNRNSNSSVSSKLIFGEDKELLKHANLNFTSLVGGKENHL
ETFYYVQIKSVIAGGEVLNIPEETWNLSTEGVGGTIIDSGTTLSYFAEPAYEIIKQAFVNKVKHYPV
LEDFPILKPCYNVSGVEKLELPSFGIVFGDGAIWNFPVENYFIKLEPEDIVCLAMLGTPHSAMSIIG
NYQQQNFHILYDTKRSRLGFAPTRCADA
SEQ 96
MPSSFSLLFLTLLLASISLSFSSTLNSNDDDFFLSSTPKFPLTMAEKLIRQLNLFPKHDINKAAATG
DSAAVTEQRLFEKKLNLSYVGNSGSTVQDLGHHAGYYRLPHTKDARMFYFFFESRSRKNDPVVI
WLTGGPGCSSELAVFYENGPFKIADNMSLVWNDFGWDKVSNLIYVDQPTGTGFSYSSNDDDIR
HDERGVSNDLYDFLQAFFKAHPQYAKNDFYITGESYAGHYIPAFASRVHQGNKNKEGIYVNLKG
FAIGNGLTDPEIQYKAYTDYALDMKLIKKSDYNAIEKSYPKCQLAIKLCGKDGGTACMAAYLVCTS
IFNKIMDIAGDKNYYDVRKRCEGDLCYDFSKMETFLNDQQVKKALGVGDIEFVSCSSEVYQAMQ
LDWMRNLELGIPSLLEDGIKLLVYAGEYDLICNWLGNSRWVHAMKWTGQKAFGKATQVSFAVD
GVEKGVQKNYGPLTFLKVHDAGHMVPMDQPKAAMEMLQRWMQDKLSKEGHLAPM
SEQ 97
MTLTLKSLAAPLFLGAFCILILQVVAEKPISEAKVESAILQESIIKEVNENAKAGWKAAFNPRFSNFT
VSQFKRLLGVKPAREGDLEGIPILTHPKLLELPKEFDARKAWPQCSTIGRILDQGHCGSCWAFGA
VESLSDRFCIHHNLNISLSVNDLLACCGFLRGSGCDGGYPISAWRYFIRRGVVTEECDPYFDNE
GFHTRVVNQDIPPQSVV
SEQ 98
MFRLVMVTKFSIFILVVLLRLFSFGFVASREIHNFGINLNFSASGIEFPQHPSFNSVTASGNSDCSY
GTSKKSTITHVITQEENNSDEKEDEDLMVSENQPREAVKFHLRHRSAGQNIEAKDSIFESTTRDL
GRIQTLHTRIVEKKNQNFISRQTKNSEKTTQSSSFEFSGKLMATLESGVSHGSGEYFMDVFVGT
PPKHFSLILDTGSDLNWIQSVPCYDCFEQNGPHYDPKDSISFKNISCDDPRCHLVSSPDPPQPC
KSENQTCPYYYWYGDSSNTTGDFALETFTVNLTTPNGDSEIKKVENVMFGCGHWNRGLFHGA
AGLLGLGRGPLSFSSQLQSLYGHSFSYCLVNRNSNSSVSSKLIFGEDKELLKHLNLNFTSLVGGK
ENHLETFYYVQIKSVIVGGEVLNIPEETWNLSTEGVGGTIIDSGTTLSYFAEPAYEIIKQAFVNKVK
RYPILDDFPILKPCYNVSGVEKLELPSFGIVFGDGAIWTFPVENYFIKLEPEDIVCLAILGTPHSAM
SIIGNYQQQNFHILYDTKRSRLGFAPRRCADA
SEQ 99
MSGFRLPLLFHLLLPLTLFLQYVQSLPQNSSTVEFLPGFDGPLPFYLETGYIGVGKSEEVQLFYYF
VKSESNPKKDPLLLWLTGGPGCSSFTGVAYEVGPLAFGQKAYNGSLPILVSTPYSWTKFASILFL
EQPVNTGFSYATTSAASKCTDLQACDQVYEFLLKWFNNHPEFISNPFYVSGDSYSGITVPVIVQL
ISDGIEAGKKPLINLKGYSLGNPLTFPEESNYQIPFCHGMGLISNELYESLKETCKGDCRNIDPIN
KLCLENFKMFKKLVSSINDQQILEPFCGTDSESPNPRQLSGERRSLEEDFIFLKHDDFICRESRVA
TRKLSNHWANDPSVQEALHVRKGTIRRAWARCRQSIMGTTYRVTFMNSIPYHVNLSSKGYRSLI
YSGDHDMVVPFQSTQAWIKYLNYSIIDDWRPWTIDGQVAGYTRSFSNHMTYATVKGGGHTAPE
YKREESFHMFKRWIAQQPL
SEQ 100
METNGLIKEILPRDAVNNMTRLILSNALYFKGEWNEKFDVSETKDHDFHLLNGGSIQAPFMTSKK
KQYIAAFDCFKILRLPYKQGTDTRRFCMYFILPDAHDGLPALLEKISLEPGFLNNHVPYGKVRARK
FLIPKFKITFGFEASNILKGLGLTLPFCGGSLTEMVDSPMPQNLSVSQVFHKSFIEVNEEGTEAAA
VTATVIMTMSLIIEKEMDFVADHPFLFLIRDESTGAVLFIGSVMNPLAG
SEQ 101
MNESYGNSRASSSSTTSSLNSSSHGTEDDHTIARILAEEEENALKYGGNKLGRRLSHLDSIPHTP
RVIGEIPDPNDATLDHGRLSSRLATYGLAEMQIEGDGNCQFRALSDQLYHNPEYHKHVRKEVVK
QLKRFRKLYEGYVPMRYKSYLRKMKRLGEWGDHVTLQAAADRFGVKICLVTSFRDNGYIDILPK
DIQPSRELWLSFWSEVHYNSLYEIGEVPARVRRKKHWLFF
SEQ 102
MSWLCPSLVLVLLIFQGPICTCSSISDLFESWCQQNGKTYSSEQERVYRLEVFEENYAYIIEHNS
KGNSTYTLNLNAFSDLTHHEFKNSFLGLSSSANDFIRLKTGSSSAGVFNDVGVVDIPSSLDWREK
GAVTKVKNQGSCGACWSFSATGAIEGINKIVTGSLVSLSEQELIDCDKSYNDGCGGGLMDYAFE
FVKKNGGIDTEEDYPFNEREGTCNKNKLQRRVVTIDGYTDVPQYDEDKLLKAVANQPVSVGICG
SERAFQSYSKGIFTGPCSTVLDHAVLIVGYGSENGVDYWIIKNSWGTSWGINGYMHMQRNSGN
QEGICGINKLASYPTKSSPNPPSPPSPGPSKCSMFTSCGQGETCCCGWRLLGVCVSWKCCGL
DSAVCCKDGRHCCPHDYPICDTSRNLCLKRMSNATIVQQPQKEAFSGKFGGLIYPF
SEQ 103
MCEPESEAARGVLSFLDVDQLFSSNYYGDGRKHDVEICHEQYARENHYHTSYCNVDNDEAIAH
VLQEDLSELSIAEDAESSHADEQYLQASTGVQHWHTPPREYYAGHDTSLEADDVGPSSSCSSP
GDRSYDGEEYTYTLEIQDEFELDGEVGKRINQLSAVPHVPRINGDIPSVDEATSDHQRLLNRLQL
FDLVEHKVQGDGNCQFRALSDQFYRTPEHHKFVRQQVVSQFQHHPEMYEGYVPMEYGEYLTR
MSKSGEWGDHVTLQAAADSYGVKILVITSFKDTCYIEILPKNQKSNRVIYLSFWAEVHYNSIYPQ
GDFLPFDFKKKKKKWSFWNKH
SEQ 104
MPSLLQIFLPLFPFFFLVSFSVSHGPFLPKAIILPVNKDLSTFQYVTQVYMGAHLVPTNLVVDLGG
SFLWTNCGLTSVSSSQKLVPCNSLKCSMAKPNGCTNKICGVQSENPFTKVAATGELAEDMFAV
EFIDELKTGSIASIHEFLFSCASTTLLQGLARGAKGMLGLGNSRIALPSQLSDTFGFQRKFALCLS
SSNGAIISGESPYLSLLGHDVSRSMLYTPLISSKDGVSEEYYINVKSIKINGKKLSLNTSLFAMDEG
VGGTKISTIPPFTTMKSSIYKSFIEAYEKFAISMELNKVEAIAPFELCFSTKGIDVTKVGPNVPTTDL
VLQSEMVKWRIYGRNSMVKVSDEVMCLGFLNGGVNQKASIVIGGYQLEDNLLEFNLGTSMLGF
TSSLSMAETSCSDFMFHSVSKDSAFDS
SEQ 105
MGAKEVLILVLVCMFIVFPSCHGDDECLNPFLVDQNCYVKDYITKLANATETVKWMMKIRRQIHE
NPELAYEEFKTSGLIREELDRMGVKYRWPVAKTGVVATIGSGKPPFVALRADMDALPIQELAKW
EHKSKVDGKMHACAHDAHTAMLLGAAKILQQLRHNLQGTVVLIFQPAEERGHGAKDMIEEGVLE
NVEAIFGMHLVHKYESGVVASRPGEFLAGCGSFKATIRGKGGHAAVPHDSVDPILAASTSVISLQ
SIVSRETDPLESQVVSVAMIEGGHAFNIIPELATISGTYRAFSKKSFYGLRKRIEEVIRAQAAVHRC
TVEIDFDGRENPTLPPTINDERIYEHARKVSKMIVGEESFKIAPSFMGSEDFAVFLEKVPGSFFLL
GTKNEKIGAIYPPHNPHFIIDEDVLPIGAAIHATFAYSYLLNSTNKFTSHSS
SEQ 106
MKLNPYSWTKVASIIFLDLPVGTGFSYARTPTALQSSDLQASDQAYEFLYKWFLDHPEFLKNPLY
VGGDSYSGMVVPIITQIIATKNEMGIKPFVDLQGYLLGNPSTFKGEKNYEIPFAYGMGLISDELYE
SLTRNCKGEYQNTDPSNTQCLQDVHTFQELLKRINNPHILEPKCQFASPKPHLLFGQRRSLNVK
FHQLNNPQQLPALKCRNDWYKLSSHWADDGQVREALHIRKGTIGKWVRCASLQYQKTIMSSIP
YHANLSAKGYRSLIYSGDHDKVVTFLSTQAWIKSLNYSIVDDWRPWIVDNQVAGYTRSYSNRMT
FATVKGAGHTAPEYKPRECLAMLKRLMSYKPL
SEQ 107
MCEPESEATRGVLSFLDVDQLFSSNYYGDGRKHDVEICHEQYARENQYHTSYCNVDSDEAIAH
LLQEELSELSIAEDAESSHADEQYFQASTGVQHWHTPPREYYAGHDTGLEADDVGPSSSCSSP
GDRSYDGEEYTYTLEIQDEFELDGEVGKRINQLSAVPHVPRINGDIPSVDEATSDHQRLLDRLQL
FDLVEHKVQGDGNCQFRALSDQFYRTPEHHKFVRQQVVSQLKHHPEMYEGYVPMEYGEYLKR
MSKSGEWGDHVTLQAAADSYGVKILVITSFKDTCYIEILPKNQKSNRVIYLSFWAEVHYNSIYPQ
GDFLPFDLKKKKKKWSFWNKH
SEQ 108
MPSLLQIFLPLFPFFFFVSFSVSHGPFLPKAIILPVNKDLSTFQYVTQVYMGAHLVPTNLVVDLGG
SFLWTNCGLTSVSSSQKLVPCNSLKCSMAKPNGCTNKICGVQSENPFTKVAATGELAEDMFAV
EFIDELKTGSIASIHEFLFSCASTTLLQGLARGAKGMLGLGNSRIALPSQLSDTFGFQRKFALCLS
SSNGAIISGESPYLSLLGHDVSRSMLYTPLISSKNGVSEEYYINVKSIKINGNKLSLNISLFTMDEE
GVGGTKISTISPFTSMKSSIYRTFMEAYEKIAISVNLTKVESIAPFELCFSTEGIDVTKVGPNVPTM
DLVLQSEMVKWRIYGRNSMVKVSDEVMCWGFLDGGVNQKASIVIGGYQLENNLLEFNLGTSML
GFTSSLSTAETSCSDFMIHSVSKDSAFDS
SEQ 109
MKMSPALSLSVIQFPLCKSQDLSKDTNNPKIFSKETPCQKSYSDTRINRRKLLSGSGLSLVAGTL
AKPARAETEAPIEATSSRMSYSRFLEYLNEGAVKKVDFFESSAVAEIFNPALNKVQRVKVQLPGL
PPELVRKLREKDVDFAAHLPEMNVIGPLLDLLGNLAFPLILLGSLLLRTSSSNTPGGPNLPFGLGR
SKAKFQMEPNTGVTFDDVAGVDDAKQDFQEIVEFLKTPEKFAAVGAKIPKGVLLVGPPGTGKTL
LAKAIAGEAEVPFLSLSGSEFVEMFVGVGASRVRDLFNKAKENSPCLVFIDElDAVGRQRGTGIG
GGNDEREQTLNQLLTEMDGFTGNTGVIVIAATNRPEILDQALLRPGRFDRQVSVGLPDIRGREEI
LKVHSNNKKLDKDVSLSVIAMRTPGFSGADLANLMNEAAILAGRRGKDKITSKEIDDSIDRIVAGM
EGTKMTDGKNKILVAYHEVGHGVCATLTPGHDAVQKVTLIPRGQARGLTWFIPGEDPTLISKQQ
LFARIVGSLGGRAAEEIIFGEAEITTGAAGDLQQITQIARQMVTMFGMSEIGPWALTDPATQSGD
VVLRMLARNQMSEKLAEDIDASVRHIIERAYEIAKNHIRNNREAIDKLVDVLLEKETLTGDEFRAIL
SEFTNIPSANINSKPIRELIEA
SEQ 110
MEGLHQLKTGELIPLSEQELVDCDVEGEDEGCSGGLLDTAFDFILKNKGLTTEVNYPYKGEDGV
CNKKKSALSAAKITGYEDVPANSEKALLQAVANQPVSVAIDGSSFDFQFYSSGVFSGSCSTWLN
HAVTAVGYGATTDGTKYWIIKNSWGSKWGDSGYMRIKRDVHEKEGLCGLAMDASYPTA
SEQ 111
MGCRMKFLNVVLVVAAVMAAAAAVAFGAEKLPAGVLSLERIFPLNGKMELEEVRARDRARHAR
MLQSFAGGIVNFPVVGSSDPYLVGLYFTKVRLGTPPREYNVQIDTGSDILWVICSSCDDCPRTS
GLGVELNFYDATISSTASPISCADQVCASIVQTASAECSTETNQCGYSFQYGDGSGTTGHYVAD
LLYFDTVLGTSLIANSSAPIIFGCSTSQSGDLTKTDRAIDGIFGFGQQGLSVISQLSSHRITPKVFS
HCLKGEGNGGGILVLGElLDPRIVYSPLVPSQAHYNVYLQSIAVNGQLVPVDPSVFATSGNRGTI
VDSGTTLAYIATEAYDPFVNAITAAVSPSVRPIISRGKPCFLVSSSIAEIFPPVSLNFDGGASMALR
PSDYLVHMGFVEGAAMWCIGFEKQDQGVTILGDLVLKDKIFVYDLARQRIGWADYDCSSSVNVS
ITSGKDEFINAGQLSVNRASGSLLFNPRHTRTIFHLLSLVLMIGSPFLT
SEQ 112
MTRASIILLLLLIATSIAAAQGGALTFDDDNPIRQVVVSDGLQELENGILQLIGQTRRALSFVRFVR
RYGKRYDSVEEIKQRFEIYLDNLKMIRSHNKQRLSYKLGVNEFTDLTWDEFRRERLGAPQNCSA
TTKSDLQLTNVNLPETKDWREAGIVSPVKKQGKCGSCWTFSTTGALEAAYAQAFGKNISLSEQQ
LLDCAGAFNNFGCHGGLPSQAFEYIKYSGGLDTEEEYPYAGKAGVCKFSSENVAVKVVDSVNIT
KGAEDELKYAIAFIRPVSVAYQVVKGFKQYKGGlYSSTVCGNIPQDVNHAVLAVGYGVDNGTPY
WLIKNSWGAEWGDNGYFKMEMGKNMCGIATCASYPIVA
SEQ 113
MNPEKFTHKTNEALAEAHELAISAGHAQFTPLHMALALISDHNGIFRQAIVNAAGSEETANSVER
VFKQAMKKIPSQTPAPDQIPPSTSLIKVLRRAQSLQKSRRDTHLAVDQULGLLEDSQIGDLLKEA
GIGAARVKSEVEKLRGKDGKKVESASGDTNFQALKTYGRDLVEQAGKLDPVIGRDEEIRRVIRIL
SRRTKNNPVLIGEPGVGKTAVVEGLAQRIVRGDVPSNLSDVRLIALDMGALIAGAKYRGEFEERL
KAVLKEVEEAEGKVILFIDIHLVLGAGRTEGSMDAANLFKPMLARGQLRCIGATTLEEYRKYVEK
DAAFERRFQQVYVAEPSVPDTISILRGLKEKYEGHHGVKIQDRALVVAAQLSARYITGRHLPDKAI
DLVDEACANVRVQLDSQPEEIDNLERKRIQLEVELHALEKEKDKASKARLVEVRKELDDLRDKLQ
PLTMRYKKEKERIDELRRLKQKRDELTYALQEAERRYDLARAADLRYGAIQEVEAAIANLESSTD
ESTMLTETVGPDQIAEVVSRWTGIPVSRLGQNEKDKLIGLANRLHQRVVGQDDAVRAVAEAVLR
SRAGLGRPQQPTGSFLFLGPTGVGKTELAKALAEQLFDDDKLMVRIDMSEYMEQHSVARLIGAP
PGYVGHEEGGQLTEAVRRRPYSVVLFDEVEKAHPTVFNTLLQVLDDGRLTDGQGRTVDFTNTVI
IMTSNLGAEYLLSGLMGKCTMEKARDMVMQEVRKQFKPELLNRLDEIVVFDPLSHEQLRQVCR
HQLKDVASRLAERGIALGVTEAALDVILAQSYDPVYGARPIRRWLEKKVVTELSKMLVKEEIDEN
STVYVDAASSGKDLSYRVEKNGGLVNAATGKKSDILIQLPNGVRSDAAQAVKKMKIEEIVDE
SEQ 114
MPEAPKKSFFTLSLVPFLPVYTLIRFNPPIESEPLISSSSDECQHDQKQQSDSRNYIVRFYHYKEP
EDHWNYLQNNLKFKGWQWIERKNPAARFPTDFGLVEIDESMKELLLEKFRKMNLVKDVSLDLS
YQRIVLEEKSEKNGAFANGKKRPGKIFTAMSFSEGQNYAVANTSIMRISWSRHLLMQKSRVTSL
FGAHELWSKGHTGAKVKMAIFDTGIRADHPHFRNIKERTNWTNEDTLNDNVGHGTFVAGVIAG
QDEECLGFAPDAEIYAFHVFTDAQVSYTSWFLDAFNYAIATNMDVLNLSIGGPDYLDLPFVEKVW
ELTANNIIMVSAIGNDGPLYGTLNNPADQSDVIGVGAIDQSNHLASFSSRGMSTWEIPHGYGRVK
PDIVAYGREIMGSKISTRCKRLSGTSVASPVVTGIVCLLVSIIPESK
SEQ 115
MAQMKLSLSLFLSLVLLLAFSPSSFAKVSISSKLASKQAEKLIHELNLFPKESDNIVDRDPFPTAAS
RIVEKRFNFANLTNSSVISFEDLGHHAGYYKIKHSHAARLFYFFFESRGSKDDPVVIWLSGGPGC
SSELALFYENGPFSISNNLSLVRNEYGWDKVSNLIYVDQPTGTGFSYSSDRHDIRHSEAGVSDD
LYDFLQAFFEEHPELVKNDFYITGESYAGHYIPAFAARVHKGNKAKEGIHINLKGFAIGNGLTDPKI
QYAAYTDYALDMGLISKSDHDRINKILPVCEVAINLCGTDGKISCLAAYFVCNSIFSAVRARAGADI
NHYDIRKKCVGALCYDFSNMEKLLNMHSVKQALGVEDIEFVSCSTTVYQAMLVDWMRNLEAGIP
TLLEDGIKLLVYAGEYDLICNWLGNSRWVQAMEWSGQKEFVASPDVPFEVDSSEAGLLKSHGP
LSFLKVHDAGHMVPMDQPKVALEMLKRWIGGTLSQQTTETEDLVASI
SEQ 116
MAIHTSTLSISILVMLMFSAVTSSAEDMSIISYNEKHHTNGESTVWRTDDEIVSLYESWLVEHKKV
YNALGEKDKRFQIFKDNLRYIDEQNSAPEKSYKLGLTQFADLTNEEYKSIYLGTKPDGRSRLSYT
QSDRYAPKVGDSLPDSVDWRKKGVLVDVKNQGQCGSCWAFSAVASIEAVNKIMTGNLISLSEQ
ELVDCDTADNQGCQGGLMDDAFKFVIQNGGIDTEEDYPYKAKDGKCDQARKNAKVVTIDGYED
VPANDEKALKKAVAGQPVSVAIEAGGKDFQHYKSGIFTGKCGAAVDHGVVAVGYGSENGMDY
WIVRNSWGASWGENGYLRMQRNIGNPKGLCGIATIASYPVKTGQNPPKPAPSPPSPVKPPTQC
DDYNECPAGTTCCCVYKYYNYCFAWGCCPMEGATCCKDHNSCCPHDYPVCNVKAGTCSISKN
NPLGVKAMQHILAKPIGTFGNEGKKTPSS
SEQ 117
MACNRLHTELGNWQVNPPSGFNLEPSDYLQRWLIEVNGAPGTLYANETYQLQAEFPEHYPIKA
PQVIFLPPAPLHPDIYRDGHICLDILYDSWSPTMTVSSICISILSMLSSSTVKFPSSEMMDVPLILSK
HVFFSKFKADEDESNNANMVFSPVSIQIIFALIAAGSSGSTLDQLLAFLKFNSVEELNSVYSRVITD
VLADGSPMGGPRLSVTNWAWVDQSLSFKHSFKQVMDNVYKAASASVDFRNKGDEVTGEVNK
WAEEKTNGLIKQILPPVAVNSGTSLILANALYFKGAWTEKLNASDTKDHEFHLLNGGSVQAPLMT
SKKRQYVKAFDGFQVLRLRYKQGEDKRFLNMYVYLPNARDGLPTLLEKISSEPGFLDRHVPYEK
VKVHEFLIPKFKISLGIEALEVLKGLELTLPFKGGLTEMVGENYPLAVANVFHKAFIEVNEEGAEAP
AAKAFHKAFIEVNEEAPVAPAVTVATMMFGCSMMKVEEEIDFVADHPFMFLVKDETAGVVLFVG
TLLNPLAVSPS
SEQ 118
LKVGSFFSSLIYSCNKASPNFYSYSFSLLSCFIELVNMGAKAFLVTILLSSLLFPLALSTSNDGLVRI
GLKKIKFDQNNRLAARVESKEGEAVRASIRKYNNFHGNLGASEDTDIVALKNYMDAQYFGEIGIG
SPPQKFTVIFDTGSSNLWVPSSKCYFSVPCFFHSKYKSSQSSTYKKNGKSAAIRYGTGAISGFFS
QDSVKVGDLIVQNQEFIEATREPSVTFLVAKFDGILGLGFQEISVGNAVPVWYNMVKQGLVKEPV
FSFWLNRNTKEDEGGEIVFGGVDPNHYKGKHTYVPVTRKGYWQFDMGDVLIDGQATGYCDNG
CSAIADSGTSLLAGPTTVITMINHAIGASGVVSQQCKAVVEQYGQTIMDMLLAEAHPKKICSQVG
LCTFDGTRGISMGIESVVDENAGKSSGLHDAMCSACEMAVVWMQNQLRQNQTQERILNYVNEL
CERLPSPMGQSAVDCGKLSGMPSVSFTIGGRTFDLSPEEYILKVGEGPAAQCISGFIALDVPPPR
GPLWILGDVFMGRYHTVFDFGKLRVGFAEAA
SEQ 119
MSKQNLEAPLLDPSPATFNRRKKWSFALCFLFALTAISFIGLRHHGHVGIWLIGDVERYNGKLQQ
NADVVESEQAVVAADDGRCSEIGISMLKIGGHAVDAAVATALCLGVVNPMASGLGGGGFMVVR
SSSTSEVQAIDMRETAPLAASQNMYDNNGKSKLEGALSMGVPGELAGLHAAWSKHGRLPWKT
LFQPAIKLARDGFVVAPYLAHHIASKAKLILKDPGLRQVIAPEGKLLRAGDICHNVKLSHSLELIAE
QGPEAFYNGEVGEKLVEDVKKAGGILTMDDLRNYKVETPEAVTVNAMGYTIVGMPPPSSGTLGI
SLILKILESYNAAEGSLGLHRLIEAMKHMFAFRMDLGDPDFVNISKTVSDMLSPSFAKAIRQKIFDN
TTFPPEYYMPRWSQLRDHGTSHFCIVDSDRNAVSVTTTVNYPFGAGVLSPSTGIVLNDEMGDF
STPSEISPDELPPAPANFIQPKKRPLSSMAPIIVLKDNQLAGVIGGSGGMKIIPAVVQVFINHFILGM
DPLAAVQSPRVYHELIPNVVLYENWTCIDGDHIELSDEKKHFLEERGHQLEAHNGGAICQLIVQN
LPNSHLKLGRRSGKEYKNGVFHGMLVAVSDPRKDGRPAAI
SEQ 120
MLKKISSFNILLNMASHITLCIWLLFFFISIISLAKPETYIIHMDLSAMPKAFASHHNWYLTTLASLSD
SSTNHKEFLSSKLVYAYTNAINGFSASLSPSEFEAIKNSPGYVSSIKDMSVKIDTTHTSQFLGLNS
ESGVWPTSDYGKDIIIGLVDTGIWPESKSYSDYGISEVPSRWKGECESGIEFNSSLCNKKIIGARY
FNKGLLANNPNLNISMNSARDTDGHGTHTSSTAAGSYVEGASYFGYATGTAIGIAPKAHVAMYK
ALWEEGVYLSDVLAAIDQAITDGVDVLSLSLGIDAIPLHEDPVAIAAFAALEKGIFVSTSAGNEGPY
YETLHNGTPWVLTVAAGTVDREFIGALTLGNGVSVTGLSLYPGNSSSSESSIVYVECQDDKELQ
KSAHNIVVCLDKNDSVSEHVYNVRNSKVAGAVFITNITDLEFYLQSEFPAVFLNLQEGDKVLEYIK
SNSAPKGKLEFRVTHIGAKPAPKVATYSSRGPSPSCPSILKPDLMAPGALILASWPQQSPVTDVT
SGKLFSNFNIISGTSMSCPHASGVAALLKAAHPEWSPAAIRSAMMTTSNAMDNTQSPIRDIGSKN
AAATPLAMGAGHIDPNKALDPGLIYDATPQDYVNLLCALNFTSKQIKTITRSSSYTCSNPSLDLNY
PSFIGFFNGNSSESDPRRIQEFQRTVTNIGDGMSVYTAKLTTMGKFKVNLVPEKLVFKEKYEKLS
YKLRIEGPLVMDDIVVYGSLSWVETEGKYVVRSPIVATSIKVDPLTGHN
SEQ 121
MEFYQKLATCSHLSLLCFILLHSIQVQGSYFDQEYGKQVLSSAIQDKDWLVSIRRIIHEYPELRFQ
EYNTSALIRTELDKLGIYYEYPFAKTGLVALIGSSSPPVVALRADMDALPLQELVEWEHKSKVTGK
MHGCGHDAHTAMLLGAAKLLNERKDKLNGTVRLVFQPAEEGGAGAYHMINEGALGDAEAIFGM
HVDFKRPTGSIGTSPGPILAAVSFFEAKIEGKGGHAAEPHATVDPILAASFAVVALQQLISREVDP
LHSQVLSVTYVRGGSASNVIPPYVEFGGTLRSLTTEGLLQLQKRVKEVIEGQAAVHRCKAYIDMK
EEDFPAYPACINDERLHQHVGRVGKLLLGSENIKETEKVMAGEDFAFYQELIPGVMFQIGIRNEK
LGSTHAPHSPHFFLDEDVLPIGAALHTAIAEMYLNDYQHPIAV
SEQ 122
RHYIYGKLTSNMKTFGIPLAAHSRVLTGSYIRSLYLQILTPFLVHTTAQADNLNCDRSATLNCDRS
ATEVCTDSEVSTDMEPGNSIVNGVPESIAEEDTAEPLDMDFEFYLSDDKATFKGSEIVMNEPLQS
TDISGRLNVLVSWSPKMLEQYNTGLFSSLPEVFKSGFFAKRPQESVSLYKCLEAFLKEEPLGPE
DMWYCPACKQHRQATKKLDLWRLPEILVIHLKRFSYNRFLKNKLETYVDFPTHDLDLSSYLAYK
DGKSSYRYMLYAISNHYGSMGGGHYTAFVHQGADRWYDFDDSHVYPISQDKLKTSAAYVLFYR
RVEEI
SEQ 123
MSRNSLKIHLSIGKIQPGSENKNGSPVYTDSGTCEHLSELRSRVGSNPFFNFRGCVKVRPLGRA
SIRREPPNELVRCGACGQAPPRLYACVTCAAVFCRVHAPSHPVGNASDPSLHSIAVDIDRAELF
CCGCRDQVYDRDFDAAVVLAQTEATVIGSIQDPPPQPENTRKRRRVEYKPWTPDVKEQVLIVG
NSSPLPSQLGNDSTTPEVQWGLRGLNNLGNTCFMNSVLQALLHTPPLRNYFLSDKHNRYFCQR
KNNSVITRSSSDNGNKNSTMLCLACDLDAMFSAVFSGDWTPISPAKFLYSWWKHASNLASYEQ
QDAHEFFISVLDGIHERMQNDKGKALSPGSGDCCIAHRVFSGILRSDVMCTACGFTSTTYDPCID
ISLDLELSQGSSAKMTSKKSHNTHKKEAESGKFSQNGRISTLMGCLDHFTRPEKLGSDQKFFCQ
HCQVRQESLKQMSIRKLPLVSCFHIKRFEHSVIKKMSRKVDHYLQFPFSLDMSPYLSSSILRSRF
GNRIFSFDGDEQDASCESSSEFELFAVITHTGKLDAGHYVTYLRLSNQWYKCDDAWITQVSESI
VRAAQGYMMFYVQKMLYYKASENQVS
SEQ 124
MATHSSTLTISISLLLLLFFFFFSTLSSASDMSILTYDENQHFRTDDEVMSLYESWLLEHGKSYNA
LDEKDKRFQIFKDNLRYIDEQNSVPNKSYKLGLTKFADLTNEEYRSMYLGTKTSDRRRLLKNKSD
RYLPKVGDSLPDSVDWREKGVLVGVKDQGSCGSCWAFSAIASVEAVNSIVTGDVISLSEQELVD
CDTSYNDGCNGGLMDYAFDFIIKNGGIDTEEDYPYTGRDGRCDQSRKNAKVVTIDGYEDVPAN
NEKALQKAVANQPVSIAIEAGGHDFQHYVSGIFTGKCGTAVDHGVVAVGYGSENGMDYWIIRNS
WGASWGEKGYLRVQRNVASSKGLCGLAIEPSYPVKTGVNPPKPGPSPPSPIKPPTQCDDYAQC
PEGTTCCCVFEYYNSCFSWGCCPLEGATCCEDHYSCCPHDYPVCNIRAGTCSISKDNPLGVKA
MKHIHAEPIEAFINGGRKSSS
SEQ 125
MKKLFLVLFSLALVLRLGESFDFHEKELETEEKLWELYERWRSHHTVSRSLDEKDKRFNVFKAN
VHYVHNFNKKDKPYKLKLNKFADMTNHEFRHHYAGSKIKHHRSFLGASRANGTFMYANVEDVP
PSVDWRKKGAVTPVKDQGKCGSCWAFSTVVAVEGINQIKINELVSLSEQELVDCDTSQNQGC
NGGLMDMAFEFIKKKGGINTEENYPYMAEGGECDIQKRNSPVVSIDGYEDVPPNDEDSLLKAVA
NQPVSVAIQASGSDFQFYSEGVFTGDCGTELDHGVAIVGYGTTLDGTKYWIVRNSWGPEWGEK
GYIRMQREIDAEEGLCGIAMQPSYPIKTSSSNPTGSPATAPKDEL
SEQ 126
MARPQFTVILAIISLLIHYGVVSGFRLSDVTNGSSVFLPSPADGSRHTTMLLPLFPPKDTSRRAEIS
RRHLQKSPASARMSLHDDLLLNGYYTTHIWIGTPPQKFALIVDTGSTVTYVPCSECKKCGNHQD
PKFQPEMSSTYQSVKCNKACPCDHKRQQCIYERRYAEMSASYGLLGEDIISFGNLSELAPQRAV
FGCEIAETGDLYSQRADGIMGLGRGDLSIVDQLVEKHVISDSFSLCYGGMDFGGGAMVLGGVK
PPADMAFTKSDFGHSPYYNIDLKEIHVAGKPLNLNPRVFGGKHGTILDSGTTYAYLPEAAFAAFK
NAVVKELHSLKQIEGPDPSFKDICFSGAGSNISELSKNFPRVDMVFSDGKKLTLSPENYLFQHFK
VRGAYCLGIFPNGKNPASLLGGIVVRNTLVTYDRENKRIGFWKTNCSELWDRLNLSPPSPPSPS
VSSLDNTNSSAHLSPSSAPSGPPGYNTPVEIKVGLITFYLSLSVNCSELKPRIPELAHFIAQELDV
NVSQVGF
SEQ 127
MGAKSFLVAFFLSLLLFPLAFCTSNDGLVRIGLKKIKFDQNNRLAARVESKEGEALRASFRKYNN
LRGNLGASEDTDIVALKNYMDAQYFGEIGIGSPPQKFTVIFDTGSSNLWVPSSKCYFSVPCLFHS
KYKSSQSSTYKKNGKSAAIRYGTGAISGFFSQDSVKVGDLVVKNQEFIEATREPSVTFLVAKFDG
ILGLGFQEISVGNAVPVWYNMVKQGLVKEPVFSFWLNRNTEEDEGGEIVFGGVDPNHYKGKHT
YVPVTRKGYWQFDMGDVLIDGQATGYCDNGCSAIADSGTSLLAGPTTVVTMINHAIGASGVVSQ
QCKAVVEQYGQTIMDMLLAEAHPKKICSQVGLCTFDGTRGVSMGIESVVDENAGKSSGLHDAM
CSACEMAVVWMQNQLRQNQTQERILNYVNELCERLPSPMGQSAVDCGKLSGMPSVSFTIGGR
TFDLSPEEYILKVGEGPAAQCISGFIALDVPPPRGPLWILGDVFMGRYHTVFDSGKLRVGFAEAA
SEQ 128
MVVAFVGIAKSIGQQCLRRSKPYSYSYFSSYVRSSNSKYGLQNWQFQSHRTLILQSASESVKLE
RLSDSDSGILEVKLDRPEARNAIGKDMLRGLQQAFEAVSNERSANVLMICSSVPKVFCAGADLK
ERKTMILSEVQDFVSTLRSTFSFLEGLHIPTIAAIEGIALGGGLEMAMSCDIRICGEDAVLGLPETG
LAVIPGAGGTQRLPRLVGKSIAKDIIFTGRKISGKDAVSIGLVNYCVPAGEARLKTLELARDINQKG
PVALRMAKCAIDKGVELNMESALALEWDCYEQLLDTKDRLEGLAAFAERRKPRYKGE
SEQ 129
MCSSNSLYINPKPCKHLADYKVKNGMSGYSLIQECFKTTPYGRTTLEISKSELPRCSICSGHEGR
FYMCLICSSVLCCLSPESNHALLHSQCKAGHEISVDMERAELYCSVCCDQVYDPDFDKVVMCK
HIMGFPRTEIGVVESELRLSKRRRLSFGMDLDSKNMKTLFLRRDQKSKSCFPLVLRGLNNLGNT
CFMNSVLQVLLHAPPLRNYFLSDRHNRDICRKMSSDRLCLPCDIDLIFSAVFSGDRTPYSPARFL
YSWWQHSENLATYEQQDAHEFFISVMDRIHDKEGKASLATKDNGDCQCIAHRTFYGLLRSDVT
CTSCGFTSTTHDPCMDISLDLNSCNSSPKDFANKSSKPNESLVGCLDLFTRPEKLGSDQKLYCE
NCQEKQDALKQMSIKKLPLVLSFHIKRFEHSPTRKMSRKIDRHLQFPFSLDMKPYLSSSIVRKRY
GNRIFSFDGDESDISTEFEIFAVVTHSGMLESGHYVTYLRLRNQWYKCDDAWITEVDEEVVRAS
QCYLMYYVQKMLYHKSCEDVSCQPMSLRADTFVPIAGCC
SEQ 130
MKELHSLREIEGPDPNYKDICFSGAGSDISELSKSFPPIDMVFSNGKKLSLTPENYLFRHSKVRG
AYCLGIFQNGKDPTTLLGGIVVRNTLVTYDRENERIGFWKTNCSELWDRLNLSPSPPPPPLPSGL
DNTNSSANLTPALAPSLPLEHAPGKIKIGLVSFDMSLSVDYSALKPRVPELAHFIAQELEVNVSQV
HLMNFSTEGNDSLIRWAIFPAGSANYMPNATATEIINRLAENRFHLPDTFGSYKLVKWDIEPPPK
RIRWQQNYLVVVFALLVVLIIGLSASLGWLIWRRRQEIPYNPVGSAETHEKELQPLN
SEQ 131
MVTVSVKWQKEVYPAVEIDTSQPPYVFKAQLYDLTGVPPERQKIMVKGGLLKDDADWSKVGVK
EGQRLMMMGTADEIVKAPEKGPVFAEDLPEEEQVVNVGHSAGLFNLGNTCYMNSTVQCLHSV
PELKSALTEYNQLGRSNDLDHSSHLLTVATRDLFNDLDKNVKPVAPMQFWTVLRKKYPQFGQQ
SNGAFMQQDAEECWTQLLYTLSQSLKSPNSSGSPDIVKALFGIEFDNRIHCAESGEESTETETV
YSLKCHISQEVNHLHEGLKRGLKSELEKASPSLGRSAVYVKDSRINGLPRYLTIQFVRFFWKRES
NQKAKILRKVDYPLSLDVYDFCSEDLRKKLEGPRQVLRDAEGKKAGLKTSEKTSSSTDGDVKMT
EAEESSSGSGEASKTTQEGVLPEKEHHLTGIYDLVAVLTHKGRSADSGHYVAWVKQENGKWV
QFDDDNPIPQREEDIPKLSGGGDWHMAYICMYKARVVPM
SEQ 132
MEKKKEVIRLERESVIPVLKPRLIMALADLIEHSSDRAEFLKLCKRVEYTIHAWYLLQFEDLMQLYS
LFDPVNGAKKLEQQKLSPEEIDILEQNFLTYLFQIMHKSNFKIASDEEIDVAHSGQYLLNLPITVDE
SKLDKKLLEKYFAEHPHEDLPEFADKYVIFRRGIGIDRTTDYFFMEKVDMIIGRTWAWILRKTRID
RLFSRRSSSRRKKDPKKDDEINSEAEDHDLYVERIRIENMELSARSNQFSLHQVK
SEQ 133
MELTCSSPLSVNSTISFNPQLRRYGSVYPHKRCQTVFSLFPYCPSSSSHITITTATTAACSTSSST
SSLFGISLSHRPCSSIPRKIKRSLYIVSGVFERFTERSIKAVMFSQKEAKALGKDMVYTQHLLLGLI
AEDRSPGGFLGSRITIDKAREAVRSIWHDDVEDDKEKLASQDSGSATSATDVAFSSSTKRVFEA
AVEYSRTMGHNFIAPEHMAFGLFTVDDGNATRVLKRLGVNVNRLAAEAVSRLQGELAKDGREPI
SFKRSREKSFPGKITIDRSAEKAKAEKNALEQFCVDLTARVSEGLIDPVIGREIEVQRIIEILCRRTK
NNPILLGQAGVGKTAIAEGLAINIAEGNIPAFLMKKRVMSLDIGLLISGAKERGELEGRVTTLIKEVK
KSGNIILFIDEVHILVGAGTVGRGNKGSGLDIANLLKPALGRGELQCIASTTMDEFRLHIEKDKAFA
RRFQPVLINEPSQADAVQILLGLREKYESHHKCIYSLEAINAAVQLSARYIPDRYLPDKAIDLIDEA
GSKSRMQAHKRRKEQQISVLSQSPSDYWQEIRAVQAMHEVILASKLTENDDASRLNDGSELHL
QPASPSTSDEDEPPVVGPEEIAAVASLWTGIPLKQLTVDERMLLVGLDEQLKKRVVGQDEAVAAI
CRAVKRSRTGLKDPNRPISAMLFCGPTGVGKSELAKALAASYFGSESAMLRLDMSEYMERHTV
SKLIGSPPGYVGYGEGGTLTEAIRRKPFTVVLLDElEKAHPDIFNILLQLFEDGHLTDSQGRRVSF
KNALIVMTSNVGSTAIVKGRQNTIGFLLADDESAASYAGMKAIVMEELKTYFRPELMNRLDEVVV
FRPLEKPQMLQILDLMLQEVRARLVSLEISLEVSEAVMELICQQGFDRNYGARPLRRAVTQMVE
DLLSESFLSGDLKPGDVAIINLDESGNPVVANKSTQSIHLSDANGNPVVTNR
SEQ 134
MKNIERLANVALLGLSLAPLVVNVDPNVNVIVTACLTVFVGCYRSVKPTPPSETMSNEHAMRFPL
VGSAMLLSLFLLFKFLSKDLVNAVLTCYFFVLGIAALSATLLPAIRRFLPKKWNDDLIIWHFPYFRS
LEIEFTRSQIVAAIPGTIFCVWYAKQKHWLANNVLGLAFCIQGIEMLSLGSFKTGAILLAGLFVYDIF
WVFFTPVMVSVAKSFDAPIKLLFPTADAKRPFSMLGLGDIVIPGIFVALALRFDVSRGKGPQYFKS
AFLGYTFGLALTIFVMNWFQAAQPALLYIVPAVIGFLAVHCIWNGDVKPLLEFDEGKTKGAEEAD
AKESKKVE
SEQ 135
MAFSSSYFSFIFLILLFIISFVVGEIKPIYLPGTYQSSLEKQHVKSKIPFKVHYFPQILDHFTFLPKSS
KVFKQKYLINDNYWKQGGPIFVYTGNEGNIDWFAANTGFMLDIAPKFHALLVFIEHRFYGDSMPF
GKKSYKSPKTLGYLNSQQALADYAVLIRSLKQNLSSESSPVVVFGGSYGGMLASWFRLKYPHIAI
GAVASSAPILQFDKITPWSSFYDAVSQDFKEVSLNCYRVIKGSWTELDALSKHEEGLTEVSKLFR
TCKGLHSVYSARDWLWEAFVYTAMVNYPTKANFMMPLPAYPVQEMCKIIDGLPKGASKISRAFA
AASLYYNYTKREKCFNLEGGDDAHGLRGWDWQACTEMVMPMTCSNESMFPPSSYSYKEFKE
DCKKKYGVEPRPHWITTEFGGYRIEQVLKRFGSNMIFSNGMQDPWSRGGVLKNISASIVALVTQ
KGAHHVDFRSETKNDPGWLIMQRKQEVAIIQKWLEEYYRDLKQN
SEQ 136
MSRFSLLLALVVAGGLFASALAGPATFADENPIRQVVSDGLHELENAILQVVGKTRHALSFARFA
HRYGKRYESVEEIKQRFEVFLDNLKMIRSHNKKGLSYKLGVNEFTDLTWDEFRRDRLGAAQNC
SATTKGNLKVTNVVLPETKDWREAGIVSPVKNQGKCGSCWTFSTTGALEAAYSQAFGKGISLSE
QQLVDCAGAFNNFGCNGGLPSQAFEYIKSNGGLDTEEAYPYTGKNGLCKFSSENVGVKVIDSV
NITLGAEDELKYAVALVRPVSIAFEVIKGFKQYKSGVYTSTECGNTPMDVNHAVLAVGYGVENGV
PYWLIKNSWGADWGDNGYFKMEMGKNMCGIATCASYPVVA
SEQ 137
MEKEHKYSLFLTKLKLFFLVTLSTFHGLSHGFQMDQARTLMSWRRSKMHAQTTTYATNEDETE
NLVFSDEKHVGNMEDDLIKDGLPAQPSNVMFKQYAGYVNVDVKNGRSLFYYFAEASSGNASSK
PLVLWLNGGPGCSSLGFGAMLELGPFGVNPDGKTLYSRRFAWNKVANVMFLESPAGVGFSYS
NTTSDYSKSGDKRTAEDAYRFLVNWFKRFPHYKGRDFYIMGESYAGFYVPELADIIVKRNMLPT
TNFYIQFKGIMIGNGIMNDETDEKGTLDYLWSHALISDETHRGLLQHCKTETETCQHFQNIAEAEL
GNVDPYNIYGPQCSINSKSRSSSPKLKNGYDPCEQQYVQNYLNLPHVQKALHANLTNLPYLWN
PCSNLDWKDTPATMFPIYKRLIASGLRILLYSGDVDAVVSVTSTRYSLSAMNLKVIKPWRPWLDD
TQEVAGYMVVYDGLAFATVRGAGHQVPQFQPRRAFALLNMFFANHS
SEQ 138
MANSYTSINFFLAPIIFLAILGLQLQSSDGFGTFGFDIHHRYSDPVKGILDLHGLPEKGSVEYYSA
WTQRDRFIKGRRLAEADTANSTPLSFSGGNETFRLSSLGFLHYANVTVGTPGLSFLVALDTGSD
LFWLPCDCSNCVRALETRSGRRINLNIYSPNTSSTGQIVPCNSTLCGQRRRCLSSQNACAYGVA
YLSNNTSSSGVLVEDILHLETDNAQQKSVEAPIALGCGIRQTGAFLSGAAPNGLFGLGLENISVPS
MLASKGLAANSFSMCFGPDGIGRIVFGDKGSPAQGETPLNLDQLHPTYNISLTGITVGNKITDVD
FTAIFDSGTSFTYLNDPAYKVITENFDSQAKQPRIQPDGEIPFEYCYGLSANQTTFEVPDVNLTMK
GGNQLFLFDPIIMLSLQDRSGAYCLAVVKSGDVNIIGQNFMTGYRVVFDREKMVLGWKPSDCYD
SRGSNDKSTTLPVNKRNSTEAPSPSSVVPEATKGNGSGNEPATSFPSVQSSKPAANQAPAHFI
CQLMMALFSLFSYYLIIISS
SEQ 139
MAIHTSTLSISILVMLMFSVVSSSAAEDMSIISYNEKHHTNGESTVWRTDDEVMSLYESWLVEHK
KVYNALGEKDKRFQIFKDNLRYIDEHNSVPDKSYKLGLTQFADLTNEEYKSIYLGTKPDGRSRLL
NTQSDRYAPKVGDSLPDSVDWRKKGVLVDVKNQGQCGSCWAFSAVASIEAVNKIVTGNLISLS
EQELVDCDTSDNQGCQGGLMDDAFKFVIQNGGIDTEEDYPYKAKDGKCDQARKNARVVTIDGY
EDVPDNDEKALKKAVAGQPVSVAIEAGGKDFQHYKSGIFTGKCGAAVDHGVVAVGYGSENGM
DYWIVRNSWGASWGEKGYLRMQRNIGNPKGLCGIATIASYPVKTGQNPPKPAPSPPPVKPPTQ
CDDYNECPAGTTCCCVYEYYKYCFAWGCCPMEGATCCKDHNSCCPHDYPVCNVKAGTCSISK
NNPLGVKAMQHILAKPIGTFGNEGKKSPSS
SEQ 140
MEIKILLASLVIWYITCINVYADDMVRIELKRQSLDLSSISDARIYAKDLRGRNRNLAAPNDQIVYLK
NYHDVQYFAEIGIGSPPQRFIVVFDTGSSNLWVPSSRCFFSIACYLRSRYKSRLSNTYTKIGKSSK
IPFGTGSVHGFFSQDNVKVGGAVLKQQVFTEVTREGYLTLLRARFDGVLGLGFDQSTTSRNVTP
VWYNMLLQHMVIKSIFSFWLNRDPTSKIAGEIIFGGMDWTHFRGQHTYVPVAQNGYWElEIGDL
FIGSNSTGLCKDGCPAIVDTGTSFIAGPTTILTQINHAIGAEGIISLECKKVVSSYGDSIWERLIAGL
QPENVCNRIGLCTNNGSLCSSCEMIVFWIQVEIRKERSKEKAFQYANQLCEKLPNPGGKSFINC
DVFALPHITFTIGDKSFPLSPDQYVIRVDDSQGVHCISGFTTLNAHPRRPLWVLGDAFLRAYHTV
FDFGSSQIGFAESA
SEQ 141
MASIFALSLFFIIISFCITSITIPVQSDGHETFIIHVSKSDKPRVFATHHHWYSSIIRSVSQHPSKILYT
YSRAAVGFSARLTAAQADQLRRIPGVISVLPDEVRHLHTTHTPTFLGLADSFGLWPNSDYADDVI
IGVLDTGIWPERPSFSDEGLSPVPSSWKGKCATGPDFPETSCNKKIIGAQMFYKGYEASHGPMD
ESKESKSPRDTEGHGTHTASTAAGSVVANASFYQYAKGEARGMAIKARIAAYKICWKNGCFNS
DILAAMDQAVNDGVHVISLSVGANGYAPHYLLDSIAIGAFGASEHGVLVSCSAGNSGPGAYTAV
NIAPWILTVGASTIDREFPADVILGDNRIFGGVSLYSGDPLTDAKLPVVYSGDCGSKYCYPGKLD
HKKVAGKIVLCDRGGNARVEKGSAVKQAGGVGMILLNLADSGEELVADSHLLPATMVGQKAGD
KIRHYVKSDPSPTATIVFRGTVIGKSPAAPRVAAFSSRGPNHLTPEILKPDVIAPGVNILAGWTGS
VGPTDLDIDTRRVEFNIISGTSMSCPHASGLAALLKRAHPKWTPAAVKSALMTTAYNLDNSGKVF
TDLATGQESTPFVHGSGHVDPNRALDPGLVYDIETSDYVNFLCSIGYDGDDVAVFVRDSSRVNC
SEQNLATPGDLNYPSFSVVFTGESNGVVKYKRVMKNVGKNTDAVYEVKVNAPSSVEVSVSPAK
LVFSEEKKSLSYEISFKSKSSGDLEMVKGIESAFGSIEWSDGIHNVRSPIAVRWRHYSAASI
SEQ 142
MPSSLFLTLLLASISLSFSSTLNSNDDEFFLSSTPKFPLTMAEKLIRQLNLFPKHDINKAAATGDSE
QRLFERKLNLSYVGNSGSTVQDLGHHAGYYRLPHTKDARMFYFFFESRSRKNDPVVIWLTGGP
GCSSELAVFYENGPFKIADNMSLVWNDFGWDKVSNLIYVDQPTGTGFSYSSNDDDIRHDERGV
SNDLYDFLQAFFKAHPQYAKNDFYITGESYAGHYIPAFASRVHQGNKNKEGIYVNLKGFAIGNGL
TDPEIQYKAYTDYALDMKLIKKSDYNAIEKSYPKCQLAIKLCGKDGGTACMAAYLVCTSIFNKIMDI
AGDKNYYDVRKRCEGDLCYDFSKMETFLNDQQVKKALGVGDIEFVSCSSEVYQAMQLDWMRN
LEEGIPSLLEDGIKLLVYAGEYDLICNWLGNSRWVHAMKWSGQKAFGKATQVSFAVDGVEKGV
QKNYGPLTFLKVHDAGHMVPMDQPKAALEMLHRWMQDKLSKQGHLAPM
SEQ 143
MLVISDCYINSCKAFNFVINLPVMGHSHSHSSHSHSHFHSSKSSDDQNMDMGESITTQTDVSFM
LAKHVFSKEVKGDSNLVFSPLSIQIVLGLIAAGSKGPTKDQLLCFLKSKSIDELNSLYSHFVSVVFV
DGSPNGGPRLSVVNGVWIDQTLPFKPSYKKVVDKVYKAASNSVDFQCKAAEVANQVNQWAKM
KTNNLIKEILPHGTVNNMTRLIFANALYFKGVWNDKFNASETKDHKFHLLSGGSIKAPFMTSKNK
QYAVAFDGFKVLGLHYKQGKDMRRFCMYLILPDARDELPALLDKISSEPGFIDHHIPFEKAKMRK
FLIPKFKTTFGFEASKVLKGLGLTLPFSSGGLTEMVDSPLAGRLFVSQIFHKSFIEVNEEGTEAAA
VTASVIMTKSLIIEKEMEFVADHPFLFLIRDESTGAVFFIGSVLNPLAG
SEQ 144
MLRIGPSLRTARKLLNRNLHFQSPIIAGDVAPVHHRRQELHRFVRRCNYSSTVGNTSASASFFST
LNNSNSSTTSTTPHVERAEENDSLQSNASEVEPVAAVEQRLSSGMVDAYLAIELALDSVVKIFTV
SSSPNYFLPWQNKSQRETTGSGFVIRGKRILTNAHVVADHTFVLVRKHGSPTKYRATVQAVGHE
CDLAILVVESEEFWEGMNSLELGDVPFLQEAVAVVGYPQGGDNISVTKGVVSRVEPTQYVHGA
SQLLAIQIDAAINPGNSGGPAIMGDKVAGVAFQNLSGAENIGYIIPVPVIKHFIAGVEERGEYIGFC
SLGLSCQPTENAQIREYFQMQSKLTGVLVSRINPLSDASRVLKKDDIILSFDGVPIANDGTVPFRN
RERITFDHLVSMKKPNETAELKVLRNGKVHDFKITLHPLQPLVPVHQFDKLPSYFIFAGLVFIPLTQ
PFLHEYGEDWYNASPRRLCERALRELPKKPGEQFIILSQVLMDDINAGYERLAELQVKKVNGVE
VLNLKHLRQLVEDGNQKNVRFDLDDEKVIVLNYESARIATSRILKRHRIPHAMSSDLTDDENAVEL
QSACSS
SEQ 145
ICREPPNELVRCGACGHAPPRLYACVTCAEVFCRVHAPSHPAGNAADPSLHCIAVDIDRAELFC
CGCRDQVYNSDFDAAVALAQTEATVIGSIQDPPPHPESTRKRRRVEYKPWTPDVKEQVLIVGNS
SPLPSQLGNDSTTPEVQWGLRGLNNLGNTCFMNSVLQALLHTPPLRNYFLSDKHNRYFCQRKN
SSVITRSSSDNGNKNSTMLCLACDLDAMFSAVFSGDRTPISPAKFLYSWWKHASNLASYEQQD
AHEFFISVLDGIHERMQNDKGKALSPGSGDCCIAHRVFSGILRSDVMCTACGFTSTTYDPCIDISL
DLELSQGSSSKMTSKKSHNTHKKEAESGKFSQNGRISSLMGCLDHFTRPEKLGSDQKFFCQHC
QVRQESLKQMSIRKLPLVSCFHIKRFEHSVIKKMSRKVDHYLQFPFSLDMSPYLSSSILRSRFGN
RIFSFDGDEQDASCESSSEFELFAVITHTGKLDAGHYVTYLRLSNQWYKCDDAWITQVSENIVRA
AQGYMMFYVQKMLYYKASEKQVS
SEQ 146
MEGSPVLGEHAELIGVLSRPLRQRATAAEIQMVIPWEAITSACGSLLKEELQTRRKIHFDNGNLIS
VKNESPSNNIRNGPSNDTREHLLIDPVPPSLIEKAMTSICLITVDDGAWASGVLLNKQGLLLTNAH
LLEPWRFGKTSVNGSGYNTKSDVVLIPSDQSEHPGVEKFDIQRRNKHLIQKELKTPHFLVDNEQ
GSFRVNLAKTGSRIIRVRLDFMDPWVWTNAKVVHVSRGPLDVALLQLELVPDQLCPITADFMCP
SPGSKAYILGHGLFGPRCDFLPSACVGAIAKVVEAKRSLLNQSSLGEHFPAMLETTAAVHPGGS
GGAVVNSEGHMIALVTSNARHGGGTVIPHLNFSIPCAALEPIFKFVEDMQNLSLEYLDKPDEQLS
SVWALTPPLSSKQSPSMLHLPMLPRGDSDGDTKGSKFAKFIADSEAMLKSATQLGKVERLSNKL
VHSKL
SEQ 147
MLKALTSSCLQNRFHAVTTAFTPQVRRGTDSNTPLLRVLGSLRSSNRRGPYLSRRFFCSDSTD
GSESNSEAAASEAKPAEKGGDADSKASAAIVPTVFKPEDCLTVLALPLPHRPLFPGFYMHIYVKD
PKVLAALLESRKRQAPYAGAFLMKDEQGTDPNVVSASDTEKNIYELKGKDMLNRLHEVGTLAQI
TSIKDDQVILIGHRRIRMTEVVSEEPLTVKVDHLKEQPYNKDDDVIKATSFEVLSTLRDVLKTSSL
WKDHVQTYIQ
SEQ 148
MERKHLWAALLLLAIACFVFPASSDSLLRISLKKRQLDISSLNVANVARLEDRYGKHVMKDIEKKK
KKKKSDTNSDIVSLKNYLDAQYYGDISIGSPPQNFTVIFDTGSSNLWVPSSRCYFSIACWIHSKYK
ARKSSTYTKKGESCSIHYGSGSISGFLSQDNVQVGDLVVTDQVFIEATRESSVTFIVAKFDGILGL
GFKEIAVGNTTPVWYNMVKQDLVKEPVFSFWLNRDINAKEGGELVFGGVDPKHFKDKHTYVPL
TQKGYWQFKMGDFSIGNQSTGFCEGGCAAIVDSGTSLLAGPTAVVTQVNHAIGAEGVLSMECK
ETISQYGEMIWDLLVSGVTPDQICLQVGLCYLNGAQHLSSNIRSVVEKENEGSSIGEAPLCTACE
MAVIWMQNQLKQKTTKESVLEYVNQLCEKLPSPMGQSVIDCNSISSMPNVTFNIGDKDFVLTPD
QYILKTGEGIATICLSGFVALDVPPPRGPLWILGNVFMGVYHTVFDYGNLQLGFAEAA
SEQ 149
SRSYYNILLLQYLFLFVMALILGWKILFILLFVIIGMCTSQVISRNIQALSMLEKHELWMSSHGRTY
KNEAEKEKRLNIFKENVKFIESFNNNGTKKPYKLGINAFADLTAEEFLSYYTTGLKLSNSYSQIQS
SFKYENLSDVPSVMDWRKSGAVTRIKHQGQCGCCWAFSAVAALEGANKLSTNNLISLSEQQLL
DCTTENNGCNGGLMTTAYDFIIQNGGIATESNYPYEEYQDSCKSQEMNSAVKINRYETLPSTES
ALLKAVAKQPVSIGIAVNEDFHLYQNGVYNGNCEGQELNHAVTVIGYGTENDGTKYWLIKNSWG
TSWGENGYMKIARDTGIEGGLCGITTLASYPVL
SEQ 150
MGLPEVVDVARNYAVMVRIQGPDPKGLKMRKHAFHLYNSGKTTLSASGMLLPSSFVNASVSKQ
IQGESKLHSFGGHFLVLTVASVIEPFVVQQDRGDISKDKPELIPGAQIDILWEGGNTLQNDIKVTN
KEGLNWLPAELLRVVDIPVSSAAVQSLVEGSSSSIEHGWEVGWSLAAYGNSRQSFTNTKRTQV
EKISFPSQTPMMEAQSSLPSVIGTSTTRIALLRVSSNPYEDLPALKVATWSRRGDLLLGMGSPFG
ILSPSHFFNSISVGSIANSYPPSPQNKALLIADIRCLPGMEGSPVLGEHAELIGVLSRPLRQRATAA
EIQMVIPWEAITSACGSLLKEELQTRRKIHFGNGNLISVKKESFSNNIQDGHANDTQEHLQIDPVP
PSLIEKAMTSICLIAVDDGAWASGVLLNKQGLLLTNAHLLEPWRFGKTSVNGSGYNTKSDVVLIP
SDQSEHPGVEKFDIQRRNKHLIQKELKTPHFLVDNEQCSFRVNLANTGSRTIRVRLDFMDPWV
WTNAKVVHVSRGPLDVALLQLELVPDQLCPIIVDFMCPSPGSKAYILGHGLFGPRCDFLPSACV
GAIAKVVEAKRPLLNQSSLGGHFPAMLETTAAVHPGGSGGAVVNSEGHMIALVTSNARHGGGT
VIPHLNFSIPCAALEPIFKFAEDMQNLSLEYLDKPDEQLSSVWALTPPLSSKQSPSMLHLPMLPR
GDSDGDTKGSKFAKFIADSEAMLKSATQLGKVERLSNKLVHSKL
SEQ 151
MDNPSEDSSDSPQQQPESPVNDDQRVYLVPYRWWKEAQESSPSDGKSVTLYAAAPAPSYGG
PMKIINNIFSPDVAFNLRREEESLSQSQENGEVGVSGRDYALVPGDIWLQALKWHSNSKAAAKN
GKSFSATDEDIADVYPLQLRLSVLRETSSLGVRISKKDNTVECFKRACRIFSVDTEPLRIWDLSGQ
TALFFSDENNKILKDSQKQSEQDMLLELQVYGLSDSVKNKVKKDEMSMQYPNGSSFLMNGTGS
GITSNLTRSSSSSFSGGPCEAGTLGLTGLQNLGNTCFMNSALQCLAHTPKLVDYFLGDYKREIN
HDNPLGMNGEIASAFGDLLKKLWAPGATPVAPRTFKLKLAHFAPQFSGFNQHDSQELLAFLLDG
LHEDLNRVKNKPYVEAKDGDDRPDEEIADEYWNNHLARNDSIIVDVCQGQYRSTLVCPVCKKVS
IMFDPFMYLSLPLPSTSMRSMTVTVIKNGSDIQISAFTITVSKDGRLEDLIRALSTACSLDADETLL
VAEIYNNRIIRYLEEPADSLSLIRDGDRLVAYRLHKGTEEAPLVVFTHQQIDEHYIYGKLTSNMKTF
GIPLAAHSRVLTGSDIRSLYLQILTPFLVHNTAQADNLNCDRSATEACTDSEVITDMEPGNSIVNG
VPESIAEEDTAEPLDMEFQFYLSDDKATFKGSEIVMNEPLQSTDISGRLNVLVSWSPKILEQYNT
GLFSSLPEVFKSGFFAKRPQESVSLYKCLEAFLKEEPLGPEDMWYCPACKQHRQATKKLDLWR
LPEILVIHLKRFSYNRFLKNKLETYVDFPTHDLDLSSYLAYKDGKSSYRYMLYAISNHYGSMGGG
HYTAFVHQGADRWYDFDDSHVYSISQDKLKTSAAYVLFYRRVEEI
SEQ 152
MASSSRVFVLLLLIIFNFLYISAQKTIKHKPFSMSFPLISTSLSHNSSSKALFLSSFMASNNRRQTQ
NTKTMSRIPSLNYKSTFKYSMALIVTLPIGTPPQNQQMVLDTGSQLSWIQCHKKIPKRPPPTTSF
DPSLSSTFSVLPCTHPLCKPRIPDFTLPTTCDQNRLCHYSYFYADGTLAEGNLVREKITFSRSQS
TPPLILGCATESEDAEGILGMNLGRFSFASQAKVQKFSYCVPIRQGSHAVKPSGTFYLGQNPNS
HTFQYINLLTFPQSQRMPNLDPLAFTVGMVGIKIGGKKLNISGRVFRPNAGGSGQTIIDSGTEYTF
LVEEAYNKVREEIVRLVGPRLKKGYVYGGALDMCFDNRPIEIGRLIGDMTLQFENGVDILINKERM
LDEVEGGIHCVGIGRSESLGIASNIIGNFHQQNLWVEFDMRNRRVGFGKGECSRQV
SEQ 153
YTIIIFSLNMKIFSIFSLLLLLLLPILASCHEKQVYIVYFGGHKGEKALHEIEENHHSYLMSVKESEEE
ARYSLIYSYKHSINGFAALLTPHEASKLSELEEVVSVYKSEPRKYRLQTTRSWEFSGVEESVQPN
SLNKDNLLLKARYGKDVIIGVLDSGLWPESKSFSDEGLGPIPKSWKGICQSGDAFNSSNCNKKII
GARYYIKGYEQYYGPLNRTLDYLSPRDKDGHGTHTSSTAGGRKVPNVSAIGGFASGTASGGAP
LARLAMYKVCWAIPKEGKEDGNTCFDEDMLAAMDDAIADGVDVISISIGTKEPQPFDQDSIAIGAL
YAVKKNIVVSCSAGNSGPAPSTLSNTAPWIITVGASSVDRAFLSPVILGNGKKFTGQTVTPYKLE
KEMYPLVYAGQVINSNVTKDVAGQCLPGSLSPKKAKGKIVICLRGNGTRVGKGGEVKRAGGIGY
ILGNNKANGAELVADPHFLPATAVDYKSAMQILNYINSTKSPVAYIVPAKTVLHSKPAPYMASFTS
RGPSAVAPDILKPDITAPGLNILAAWSGGSSPTKLDIDDRVVEYNIISGTSMSCPHVGGAAALLKAI
HPTWSSAAIRSALITSAGLRNNVGEQITDASGKPADPFQFGGGHFRPSKAADPGLVYDASYQDY
LLFLCASGIKDLDKSFKCPKKSHLPNNLNYPSLAIPNLNGTVTVSRRLTNVGAPKSVYFASAKPPL
GFSVEISPPVLSFKHVGSKRTFTITVKVRSDMIDSIPKDQYVFGWYSWNDGIHNVRSPIAVKLA
SEQ 154
MATRRSSSSALTALAASRSRLLSRFRPAVSRLSQNTLLGTGRCPPPNSGFFVAETTAALWPNYN
VLSKSFVHSYSTTAASSGQINNMDYTEMALEGIVGAVEAARTSKQQVVETEHLMKALLEQKDGL
ARRIFTKAGLDNSSVLQETDQFISQQPKVVGDTSGPILGSHLSSLLENAKKHKKEMGDSFVSVEH
MLLSFLSDTRFGQKLFRNLQLTEKALKDAVNAVRGSQRVTDPNPEGKYEALEKYGNDLTELARR
GKLDPVIGRDDEIRRCIQILSRRTKNNPVIIGEPGVGKTAIAEGLAQRIVRGDVPEPLMNRKLMSL
DMGALLAGAKYRGDFEERLKAVLKEVSSSNGQIILFIDEIHTVVGAGATSGAMDAGNLLKPMLGR
GELRCIGATTLNEYRKYIEKDPALERRFQQVYCGQPSVEDAISILRGLRERYELHHGVKISDSALV
SAAVLADRYITERFLPDKAIDLVDEAAAKLKMEITSKPTELDElDRAVLKLEMEKLSLKNDTDKASK
ERLNKLESDLKSLKAKQKELNEQWEREKDLMTRIRSIKEEIDRVNLEMEAAEREYDLNRAAELKY
GTLISLQRQLGEAEKNLADYRKSGSSLLREEVTDLDITEIVSKWTGIPLSNLQQSERDKLVFLENE
LHKRVVGQDMAVKSVADAIRRSRAGLSDPNRPIASFMFMGPTGVGKTELGKALAAYLFNTENAL
VRIDMSEYMEKHAVSRLVGAPPGYVGYEEGGQLTEVVRRRPYSVVLFDEIEKAHHDVFNILLQL
LDDGRITDSQGRTVSFTNTVVIMTSNIGSHYILETLQNTRDSQEAVYDAMKKQVIELARRTFRPEF
MNRIDEYIVFQPLDLKQVSRIVELQMRRVKDRLKQKKIDLHYTQEAISLLANMGFDPNYGARPVK
RVIQQMVENEVAMGVLRGDFSEEDMIIVDADASPQGKDLLPEKRLLIRRIENGSNMDAMVAND
SEQ 155
VNVKCFFVSFFFSFSCMSLFFLQGWNFETFCLKTQSFAVTNKNHRPHLHSHHSSFLCFHTSYLL
FFLILYIYIAKTTSRFAKTQQPPQKMSRFTMLVVLVLLLLCLCHLSVATIGSSSNKKSTYIVHVAKS
QMPESFENHKHWYDSSLKSVSDSAEMLYVYNNVVHGFSARLTVQEAESLERQSGILSVLPEMK
YELHTTRTPSFLGLDRSADFFPESNAMSDVIVGVLDTGVWPESKSFDDTGLGPVPDSWKGECE
SGTNFSSSNCNRKLIGARYFSKGYETTLGPVDVSKESKSARDDDGHGTHTATTAAGSIVQGASL
FGYASGTARGMATRARVAVYKVCWIGGCFSSDILAAMDKAIDDNVNVLSLSLGGGNSDYYRDS
VAIGAFAAMEKGILVSCSAGNAGPGPYSLSNVAPWITTVGAGTLDRDFPAYVSLGNGKNFSGVS
LYKGDLSLSKMLPFVYAGNASNTTNGNLCMTGTLIPEKVKGKIVLCDRGINPRVQKGSVVKEAG
GVGMVLANTAANGDELVADAHLLPATTVGQTTGEAIKKYLTSDPNPTATILFEGTKVGIKPSPVV
AAFSSRGPNSITQEILKPDIIAPGVNILAGWIGGVGPTGLAEDTRRVGFNIISGTSMSCPHVSGLA
ALLKGAHPDWSPAAIRSALMTTAYTVYKNGGALQDVSTGKPSTPFDHGAGHVDPVAALNPGLV
YDLRADDYLNFLCALNYTSIQINSIARRNYNCETSKKYSVTDLNYPSFAVVFLEQMTAGSGSSSS
SVKYTRTLTNVGPAGTYKVSTVFSSSNSVKVSVEPETLVFTRVNEQKSYTVTFTAPSTPSTTNVF
GRIEWSDGKHVVGSPVAISWI
SEQ 156
MLKALTSSCLQNRFHAVTTAFTPQVRRGTDSNTPLLRVLGSLRSSNRRVPYLSRRFFCSDSTDG
SESNSEAAASEAKPAEEGGDADSKASAAMVPTVFKPEDCLTVLALPLPHRPLFPGFYMHIYVKD
PKVLAALLESRKRQAPYAGAFLMKDEQGTDPNVVSASDTEKNIYELKGKDMLNRLHEVGTLAQI
TSIKDDQVILIGHRRIRMAEVVSEEPLTVKVDHLKEQPYNKDDDVIKATSFEVLSTLRDVLKTSSL
WKDHVQTYIQHIGDFNYARLADFGAAISGANKLQCQQVLEELDVHKRLQLTLELVKKEMEISKIQ
ESIARAIEEKISGEQRRYLLNEQLKAIKKELGLETDDKTALSAKFRERLEPNKEKIPVHVMQVIEEE
LTKLQLLEASSSEFNVTRNYLDWLTALPWGNYSDENFDVLRAEQILDEDHYGLTDVKERILEFIA
VGKLRGTSQGKIICLSGPPGVGKTSIGRSIARALNRKFYRFSVGGLSDVAEIKGHRRTYIGAMPG
KMVQCLKSVGTANPLVLIDEIDKLGRGHAGDPASAMLELLDPEQNANFLDHYLDVPIDLSKVLFV
CTANVVEMIPNPLLDRMEVISIAGYITDEKMHIARDYLEKATRETCGIKPEQVEVTNSALLALIENY
CREAGVRNLQKQIEKIYRKIALKLVREDGEIEPQNAEVGEVEAESIHLSDEIKSKEEIQAGAESAN
GSNDDKASENNAEAEAQGAPVNQTQKSANEDACLQDTQETEKATESEASKTVNKVVVDSPNL
ADYVGKPVFHAERIYDQTPVGVVMGLAWTSMGGSTLYIETSLVEQGEGKGALNVTGQLGDVMK
ESAQIAHTVARTILQEKEPDNQFFANSKLHLHVPAGATPKDGPSAGCTMITSLLSLAMKKPVKKD
LAMTGEVTLTGKILPIGGVKEKAIAARRSDVKTIIFPSANRRDFDELAPNVKEGLDVHFVDDYKQIF
DLAF
SEQ 157
MQFFRRNPSLHRISSRFLNQVVKTSAYSTKKVYNAGQPTAATHPQLMKEGEITPGITSEEYMQR
RKKLLEFLPENSLAIVAAAPIKMMTDVVPYNFRQDADYLYITGCQQPGGVAVLGHDCGLCMFMP
EQSPQDALWQGETAGVDAALQIFKADLAYPINRLPQILSRMIESSSTVFHNVKTRTSSYLELEAY
KKAVSNYKVKDFSVYTHEARFVKSPAELKLMRDSASIACQALVQTMLYSKLFPDEGMLSAKFEY
ECRVRGAQRMAFNPVVGGGPNGSVVHYFRNDQKIEDGNLVLMDVGCELHGYVSDLTRVWPPF
GKFSSVQEELYNLILETNKECVELCRPGTTIREIHHYSVETLRRGFKEIGILKNDRRGRYEMLNPT
NIGHYLGMDVHDCSTIGNDRPLKPGVVITIEPGVYIPSCFDCPERFQGIGFRIEDEVLITESGYEVL
TASIPKEIKHLESLLNNFGSGRGTEIRAALS
SEQ 158
LLTSHKNHIILLPFLLYKIFISLQKQTLMASSTRVFVLLLLIIFNFLYISAQKTIKHKPFSMSFPLTSTSL
SHNSSSKALFLSSLLASNQRKQAPNTKTVSRIPSLNYKSTFKYSMALIVTLPIGTPPQNQQMVLD
TGSQLSWIQCHKKIPKRPPPTTSFDPSLSSTFSVLPCTHPLCKPRIPDFTLPTTCDQNRLCHYSY
FYADGTLAEGNLVREKITFSRSQSTPPLILGCATESEDAEGILGMNLGRFSFASQAKVQKFSYCV
PIRQGSHAVKPSGTFYLGQNPNSHTFQYINLLTFPQSQRMPNLDPLAFTVGMVGIKIGGKKLNIS
GRVFRPNAGGSGQTIIDSGTEYTFLVEEAYNKVREEIVRLVGPRLKKGYVYGGALDMCFDNRPM
EIGRLIGDMTLQFENGVEILINKERMLDEVEGGIHCVGIGRSESLGIASNIIGNFHQQNLWVEFDM
RNRRVGFGKGECSRQM
SEQ 159
MAALNFFIIFTSLVLPIASDPLLSTYVVHVDTKAKPSHYLTQDEWYNSVVESVLANKMDSDSTSPR
LFYSYDVVLQGFAARLTDQESEKLNKFPEVIHIFKDQSRIKLDTTRSPNFLGLNTGYGLWPQSNF
GDDVIIGLVDTGIWPESESFKDNGIGPIPTRWKGKCVDGIEFNATSSCNRKLIGARNFVKGVEND
YHHQSARDQNGHGTHTASTAAGTEVNGANVFGFAKGKARGIASKARIAMYKACGSSSCAESDI
LAAIESAIKDGVDILSLSLGYDDAPFYENPVAIATFAAVKRNIFVASSAGNLGPYPFSVHNTAPWV
TTVGAGSLDRDFPVEINLSNNKTFVGSSLYPGRISGKSYSLVYIENCSIMTIDRSKVERKIVVCNT
SKIEALRNGILIQKAGGFGLIQLNLPTEGEGIRAMAYTLPSATLGYKEGIELLSYIKSNANPRAGFV
RRKDTVIGKKVRAPIVASFSSRGPNVVVPEVLKPDLIAPGLNILAAWPGDISPTRLKMDPRRVKFN
INSGTSMACPHIAGVAALVRAVHPDWSPAAIKSALMTTSTAFDNAQLPIIKHEDMELATPISIGAG
HVNPESAIDPGLIYDTDTSDYINLLCSLNYTEKQMKLFTNESNPCSGFTGSPLDLNYPSLSVMFR
PDSYVHVVKKTLTHVAVSKPEVYKVKIVNLNSEKVSLSIEPRKLIFNESLQKQSYVVKFESHYAFN
SSRKIAEQMAFGSILWESEKHNVRSPFAVMWVQQNFNNSRLYK
SEQ 160
MEISKIQESIARAIEEKISGEQRRYLLNEQLKAIKKELGLETDDKTALSAKFRERLEPNKEKIPVHV
MQVIEEELTKLQLLEASSSEFNVTRNYLDWLTALPWGSYSDENFDVLRAEQILDEDHYGLTDVK
ERILEFIAVGKLRGTSQGKIICLSGPPGVGKTSIGRSIARALNRKFYRFSVGGLSDVAEIKGHRRTY
IGAMPGKMVQCLKSVGTANPLVLIDEIDKLGRGHAGDPASAMLELLDPEQNANFLDHYLDVPIDL
SKVLFVCTANVVEMIPNPLLDRMEVISIAGYITDEKVHIARDYLEKATRETCGIKPEQVEVTDSALL
ALIENYCREAGVRNLQKQIEKIYRKIALKLVREDGEIEPQNAEVDEVKAESIHLSDEIKSKEEIQAG
AESANGSNDDEASENNAEAEAQGAENQTQKSANEDTCLQDTQETEKATESEASKTVNKVVVD
SPNLADYVGKPVFHAERIYDQTPVGVVMGLAWTSMGGSTLYIETSLVEQGEGKGALNVTGQLG
DVMKESAQIAHTVARTILLEKEPDNQFFANSKLHLHVPAGATPKDGPSAGCTMITSLLSLAMKKP
VKKDLAMTGEVTLTGKILPIGGVKEKAIAARRSDVKTIIFPSANRRDFDELAPNVKEGLDVHFVDD
YKQIFDLAF

The application's sequence listing, which the Patent Office published only in electronic form, follows.

SEQUENCE LISTING (160 sequences)

SEQ ID NO: 1 - DNA, 2695 bp, Nicotiana tabacum
atggctcttcgtttctctttaattttcctattttctcttttcttaacgacgtcgttattgttgtccgttaacggcaacattaacggcggtgaagatgacgatattttgatccgtcaagtcgtaggcgacgacgacgatcacttgttaaacgccgatcatcacttcacgatttttaagaggaggttcggcaaaacctacgcgtccgatgaggagcatcattacagattctcggtgttcaaggctaacttgcgccgtgcaatgcgccaccagaagcttgatccctccgccgttcacggtgtgactcagttttccgatttgactccggccgagttccgccggaattttctaggagttaaccgtcggctccggcttccttctgatgccaataaagctcctattcttcctactgaggatctcccttcaggtttcgattggagagatcacggtgccgtcacgtcagtaaagaatcaggtactagtatatatcaatgtttgtgtaaagtttatctttttttggataggcgaagtgttcgtcattaatgaataattacataatttctatttgtatcgattgaaaaactagggttcatgtggctcgtgctggtcatttagtaccactggtgcgttagaaggtgccacctatctttctacagggaagcttgtaagcctcagcgagcaacaacttgtggactgtgatcacgaggtttgacgttcttcctctttatcttagcttaaaatcatgaatatattgtcaatagagttactgtttttcttttttctttttttctgggacgtttgaatgtgtaaaataattttcgctgtggtgtgtcacaggatttggtccatagctgtcatctttttctagttaaagaaaattgatagcgtgaaggacactaaccgcataaattaaagtgctttctctgattccgtctcactttaaagtttaagaacccgtttggccatgaaatttcttttttttttccgtaaaatttaacttttcttctaaatcaatgtttggccatcaaattttttattttcacttgaagataattttacaatttttcaaaaatttgaaaaacttcaaaaactgtttttcaaaattttgaatattgttgttgatgtaaaaaacagacactaatttataagagtaatctcctcttctttgtttggtggatggccaggggtggggactggggacccatcttaagggagcggaggaaaagttgttttattattagtttatggctggttatgaaattcaactaattgatactctgaggataaccacggacaaaattgtttggatgatgaggaaatcgcatccaaaaattgtctgcatctgaatatacttttaacattacttgaagtttcaagtttaagctcgtgtatgcaacgtggtgggagatgtacaaggataaatagaaaggcgttgagttattgagataggtttgtaaaactcttcttaaattttccattgtttgattgccattatataatcatttgtataatttccaacttggaaaaagctgttcaaactcaaaataaggtttaggcttgaacttattgctatttacggtgtctgccattttataatcagaaatgggattgaatacagagttaataagaccactgactcgccttatttacctcactcgtctcagatgaattttatacttccaaatttcagtgttccccatctccctgaaaaatgtataatttggccttgcatttatctgcagtgtgatccagaagaaaaagattcatgtgacgcagggtgcaatggtggcctaatgaatagtgcctttgaatacactctgaaagctggtggacttatgcgagaagaagattatccatacactggcaccgatcgtggaacctgcaaatttgacaacaccaaggttgctgctaaagttgctaactttagcgttgtctcccttgacgaagaacaaatcgctgctaatcttgtcaagaatggtcctctcgctggtaaatagtctctcaaaacacttttcaatttgcctatcattatgcttcttctttgtccttacttgatattgtcaaagtatatacttggattgtcatatttatgcactggaatgtaaaaggtatttacacaattaagtcacttattaggtaattacaagtaactattttgataagttttaattagtaatgtgttaaaatgataattaacttgctatttaaattcactgatagccgtaacaaaatcttttaactattaatatatataatataaatatttgttttttaataaacaacaaatattatttgtgaaagatccagttatgtagcttgaaactacattttgggattttgaattatgtactactcttcttatgctaatggttttcaatttttcactgatgtaaacttctgaaagcatttttgttgcttggcttgcagtggcgatcaatgcagtgttcatgcagacatacgttggcggagtttcctgcccatatatatgctctaagaagttggatcatggtgtcttattagttggttatggtactggcttttctcccattagaatgaaagagaaaccatactggatcatcaagaactcatggggagagaaatggggtgaaaacggatactacaaaatctgtagaggccgcaatgtttgcggagtggattcaatggtttcaacagtttcagctgttagtaccagctcacac

SEQ ID NO: 2 - DNA, 5083 bp, Nicotiana tabacum
  misc_feature (776)..(776): n is a, c, g, or t
ttaagctgcttcagcaaatccaactctgagtttgccataatcgaagactgtgtgatatcgacccatgaaaacatcacccaagatcctgtaaccaaaggaataccatagagaactcagtgaacaaaagaactgcaggctcaggtttaattgtgctgtagctctatagttcggattaaacttatatttggattaactgcattgctgatatttatctctaaaacataattataaactaaaatagagagaacatataaagataactttaccagagtggtccgcggggaggaggaatgtccaagccagtgaaaccactaatacactgtgccttagcaccctcgcccaccttgagtatgtactgatcacgggaaaagaatccaaaattagaacatagatcaatctaggtcagcaatctaaacagacaactgaaacaagtaaaagggaaccacacatcggattacaacttcactctttcaatcttgaaaaaatttgttgaaagggtgggaaaagactagagtgatagtctagtagagaaaagttttgcatatggtcaaggggtttggtgtatcacttggattttttcctttgtaagatgtggtctatcctgaattattcaaagctcaacctctttatgttactaaaccacaaaacaaacaaattcagaaaaaatgcaaatgatcaaattgatttggtgtacacttgatgaatttcttctttgtaagatttgttctatactgaatccttcagacataaaaaaaaatattttttttttggggggncggcctgaattagcaaggtcagcaagtaatacacttccataaaaatagcaaagggtaactttttcacggcacaaagatcttatgcaggttttcttagattacttagctggaaaatgagacatctaaatttaagtaaagtcgaaatactcacaacctcaaaatatagaagtacttcttgatgacaacaaacatctacttctctgtagaaactgaaaaccttaaacactagaatcggttttgtaatatgacaattagttgtaatgccacaaaaggactctatgatgagccacttaattttttctctctttgacaatgttgaattagaagaggaatagcaatgtttattactgtcaaagaccattataaagcatacctccttcgggacgaggtcaaaaactttgccaccaattgtgaaagagactgtaggcattgaagaaagctttccacagtcaacagctgattcccccaatgggcttgggagacgctcgcaaagctgtcagtcagtcagcaatcttttcaagaaaagaagaaaattgcagtgacagatgttttacctcattcacatagtttaatatgcgatcttgagtctggttttgtctcagttgattctccatccatatgaccgccatttcacaagcagagcacataccatcctgcagtcctgtggatctgccagctttctcgtctacaacactctcaattcccatactgcagaaaaaaggccacagaattattcagtatttatatcaacattatggattaaccaaatgcactatatgttcacatgaaggggcaaagagagcctgaagactaacctaactccgcggtttccatcgaaagtgcatactccaacctgtgagcaaatcttctttggatgtgcctgtttaaatactgaccaattagataaccgggaaaggcaactagattgccaagtgtcattttgctgtaactgcacaggaaactgcatatcaaacaaatgaaaatgcagttacacagttgaatgctcacctctgctaacagcaaatccatgattgtctgcccgtactgctccactacagatttgcattgttggctagcaactccagaggctccaatggcttgattaatcatagtgattatggtctgtacggaaaggggtgggtttaagattgctcaaccttggaagtgttttaatcgtacaattgtagagacaaaaggcagcagatttttacttaatttatattgtcaacatttccaagccaacaggataaaacttggctacagttttcgggttggataattttcttttcaaatagaagaggggtaaataaataagtcgacagaagaccaggactacagcagaagtaaaagcatcatcctcattgaaacgtaataaaagcaagtaacacaaaacaacaagtacctactgaggcagctttaaacatattaaactgaaagacagggaagaaaaagcagatttacagacttcggcccagtgataagctaagatggtatatccaaaggtaacctcagaaatgaaaaaccaatttcactaccatcctctctgtgatgaaaaattaaaacacaacacagatcagatgatggattcgtgctatttaactcatgaatcttaggaaaatgttacttttcttgctgagctgttgaaggttcaaaggaacaaggaaatcaataatcgaattgcggttgactttgatgatgcaaacaaataacaaaaacataacaaacaagcgatatgtcccaaatcaaggctatagataataccgttggaccagccaagagagaagtccctgaatccgctattgcagagcacccactttcacagtaacctacacccgatatgttcatgttaaaaactcaaaggaagggaaaattctatatccaggcacatagccttcatctatattcccgaaattcggcaatccaattcaaaaggtacatagcaaaacataccagtagctttaccctcgataagaacatcacccatatcaaactgccaatcatattactaagatcaagatagcatttgtacaaaaaatgaacatacatagtatcgaattgaccgaatgacaaacctgccaataacctttgtgtgtgactgggacataagtgatttctcccttatagtgattaggatcaaccccaccaaacacgatttctccgccttgttcttcctctgtatttcggttgagccaaaatgagaagacaggatccttgataagaccctgttggaccatgttgtacctggaaaagacaggagatgctgcccagatgaatgtcaaatcaaatttaaacagaaagagacatccagcctatcctgcatttatggaaatctaatccttcaatgtgttaaacctcttctggaaaggaaattgtctagagctttaatttggtttgtgggaaagaaatagagcaaactaaataccgcccacgtaccaaactggaacagcattgccaactgaaatctcctggaatccaagacccaatataccgtcaaacttggctaccaaaaatgtcacgctgggttctctggttgcctcaataaattcctagtacatgaacaccttgagatataagatttccactttcaagagatttaaaacaagtgaggagcctcactaacctgatctgttacaacaaggtcaccaactttgacgttgtcttgactgaagaatccagaaatagctccactaccatactgaattgcagcagacttccctgtatggcaaatcaaaaatttatcacgaactaaatcacattaaattacaatgccaaatacgatctcagtcttgtggaaacattcgataagatcttaatgttgttcattaaggtaggagtgacctagtgttcttaaaagcaaaacgtgcaaaaaaataaaacaaggtccacggacttgcattgaattgcgagaagtgaagcgcaaaattaacaggaaacaagaaaatatcgaacatttatgaatttactctaccataaaaattaaactgcaggttaaataactaatttcggcatccaatatacaataatcccagtattaattcaactcctcaaaattgagattcaaagaagcaaccaattctagttggaatcactttgtgcaccattatttgaagcgcaacttctctaaagcgcatggcttcagcaatgaagtgatagcccttgctgcatcgcttcataactttaaacgaccaagcaatggctttcaataacactggagtgaactcacctggcaaacccattcaactgctatagactgttcaatccattttctttgagcaacatatataattgtaatagaacaaaaaataaagaataactagttctctgcggaaaatttcttatgtcacagacctacatggatacaaaccgagttaatagggaagaagaaagaccatctaaaaaggcattgcataggttaagacttaagactatacaaggtgcaacgaaaaggcactaatcgcagagagatataaggatattgatgtttcttttccaaaacctcactagttacagtaatatactaagaaacacaacataaacattaaacagcctcgttttatgtcttaacagtcaactacatgtactcgtcaattaacctttccaagggaatcccttgatgcaccgtgagaaacacataaggacaatacaaaagatgttccataatgaacaagatggcacgtattctaaacaataacaggcattagaaggaagcatatgtttcatgcagcaataaacaagcaaatggtagagagaaacaatttgcatcaacatacagaaatggaaacataacataccattcttcttataagtacttgattcgcttgatttgaacttggaatgaaagaaacagggaacctacaccaagataggcagtcatcaaattttacatcactcaagatggatgtacaatgctatgctttgtatcatttgcatgtatagaagcttacagagaaatagcacttcgacgacggcacccacaaattcgagctaccagtgtcaaagattacagtgaacttctgaggtggagtgcctacaccaatctccccaaaatattgagcatccatatagttcttcagtgctacaatgtctgtatcctcagagtccccgagtttaccacggaagttatacttcctaatagacgccctcaaaacgtccccttcctttgactcaatgcgtgcagcaagccggttattttgatcaaatttcatttttttcaagccaattctcatcaagccatcattggatgaggaggccaaaggaaagagcagtgctgagagaaacagggcaacaagaaatacttttgctcccat

SEQ ID NO: 3 - DNA, 3802 bp, Nicotiana tabacum
atgggttctttcctctgtttctccgtcattgttgttctccttgttcttcagccatgtttagccaagaaagtttacattgttcacatgaaaaatcaccaaataccttcttcttttgctacccatcacgattggtacaatgctcagctccaatctttgtcctcttcttctacctctgatgaatcatcccttctttactcttacgacactgcttattctggctttgctgcttctcttgacccacatgaagctgaactactccgtcaatctgatgatgttgttggagtttacgaggatactgtttatacactccatacaacaaggactcctgagtttctggggttgaataatgagctcggcctttgggctggtcacagtccacaggaactcaacaacgctgctcaggatgttgttatcggagttcttgacaccggcgtttggccggagtcgaagagctataacgatttcggtatgcccgatgtgccgtcgaggtggaagggtgaatgtgaatcgggttccgatttcgatccgaaagtacattgcaacaaaaagctgataggtgctcgttttttctccaaaggttatcaaatgtcggcctctggctcgttcacgaaccaacctagacagccggagtcacctcgtgaccaagacggtcatggcacccacacatccagcaccgccgctggtgcacctgtggcgaacgctagccttctcgggtacgctagtggggtcgcgcgtggtatggcacctcgagcgcgtgtagctacgtacaaggtatgctggcctactggttgttttggttctgatattctagctggtatggaacgtgctattttagatggagttgatgtactttcattatctttgggtggtggatcgggtccttattatcgtgatacaattgctattggtgctttctctgctatggaaaaaggaattgttgtttcctgttcagctggaaatagcggtccagctaaaggctcacttgcaaatacagctccttggatcatgaccgttggtgctggtaccatagatcgtgatttccctgcatttgctactttaggtaacgggaaaaaaattaccggagtttcgttatacagtggaaaaggaatgggtaaaaaggtagttccattagtttacagcacagacagtagtgcaagtctttgtttgccgggttcacttgacccgaaaatggtccgagggaaaatagtgttatgtgatagagggacaaatgcgagagtagaaaagggtttagtagtgaaggaagctggtggagttgggatgatattggctaatacggcggagagcggcgaggaattggtggcggatagtcatttgttgccggcggtagctgtaggtaggaaattgggagattttataaggcagtatgtaaagagtgaaaagaatccggccgccgtgctcagctttggtgggacggtggtgaatgtgaaaccgtcgccggtggtggctgcgtttagttcaagagggcccaatactgtaactccacagattttgaagcccgatgttattgggcctggagttaatattttggctgcttggtctgaggctattgggcccactgggcttgaaaaggataccagaaggaccaagttcaacatcatgtctggtaagtattaccaacaacggctagtttcttaatttaatctttttcatgcttagcttaattatggccttaattatatttttattagatctcgcaattattaatactaaccgtacacacttaaaaaggaaaagaggaacgcgtagaataaagacacctgtgggtgatctggaattatgtactatgcacattcctaaactttagaggggttcacatgtgtagcattgataagttaatcctaaattacattagttataattaaatattaatgcagtttccaagaaaatagatggactaaaatttagacttatttgtatgatgtgacgtgtggaattaaatttaaaaactgcccaagcctatatcaaatttatggctaaaatagcaagaaacgtccctttaataggcacagaagaaatccaagaggggctcgctgtaggagtgttaagagtttcgatatgaacaaggtctagagaagaatttattaattaatttcaataatatacgctaatggtatttgaaaacaatatattgtaatttatcgtaacaagttactaatttcgcttattatagaccattattgtgaagttatttctatagataagccaatagcataaaattcatccgtcggaatgtgcaaggtgtagtggtaggagtgctactcatgatgtgacaagtgcatgtcacggggtttgaatcataatgcaaacaaaagcctgatatgttagtgaaaaatgatagagggacgggttcattattcacacaaaagcttgatatttaagtgaaaaatgataggggaacgagttcattatccaaagagtttcgaacctaaccttacaccatggcccttcttggtataatttacactagttttatgaggctcctttttgtctcacaaatttgtggatcccaatcttacacttctgggtccacaaaattgtgagacaaaaaagttacctcatacaactagtctcggttgtgactagttgtatgagacacaaaataaaattttccgaaaaagtagtatggtctgtcttccgctatgagactagttgtttgaaacacaaaataaaattttccgaaaaagtagtatcgtctgtcttccactagtgggtcctggtccccttggaatcccagattattggtccctacataactataaaggtcataaccttatcatggatttaacatcaaccctttgccccatctgagcactctggacctaccttaatcactttattggctggaaataagttgatgaactttttgaatttttcttgaaaaaacaacaacaaaaaaccacttgtgatcccacaagtgggtccggggattagtgtgttataaagaggatgtttcggatagactttcggcttaggaaagatcaataaagtagtagaaacaagcaataacaatagcaaaatactgaatttttcttgaaaatcctacacaaatctcatactttgaaaattgtattttgttacataatttgatcatttttcacttcgaactcttgtaggcacatccatgtcctgtcctcatatcagtggcctagctgcactgctgaaagcagcacatcctgaatggagtccaagcgcgatcaaatctgcacttatgacgactgcctatgttcgcgacaccaccaactctcctctccgcgacgctgaaggtggccaactctccactccttgggctcatggatcaggtcatgttgatccccataaggcactttcccccggtctaatctatgatattaccccagaggactacatcaaattcttatgctccttggactatgagttgaaccacatacaagccattgtcaagcgcccgaatgtcacttgtactaagaaatttgcagatcctgggcagattaactacccttcattctcagttttgttcgggaaatcaagggttgttcgttacacccgtgcagtcatcaatgtaggagctgcaggatccgtctatgaggtgaccgttgatgctcccccgtctgttactgtaaccgtgaagccatcaaaacttgtattcaaaagggtaggagagaggctgcgttacaccgttacattcgtgtcaaagaagggtgttaacatgatgagaaagagtgcatttggctccatttcttggaataatgctcaaaaccaagttaggagtccagtttcatattcctggtcacaactattagac

SEQ ID NO: 4 - DNA, 1671 bp, Nicotiana tabacum
tcaagcatcagcacatcttgttggtgcatatcccagtctggaccttttggtgtcatataagatatgaaaattctgctgctgatagtttccaattatcgacaaagcagatcgaggagtccctaaaactgccaaacaaacgatatcctctggttcgagtttgataaagtagttctctactggaaaattccatacagctccatcaccaaacacgatcccaaacgagggaaattccaagttcttcacaccagacacattgtaacacggattcaaaataggaaagtcttgtacaatgggatatcccttaaccttattgacaaatgcctcttttataatctcataagcaggatccgcgaaataactcaatgtggtacctgaatcaatgattgcaccaccaagaccttctagcgataaattccacgtctcctcgggtatattcagtacctctcctccaactatgacagactttatctgcacatagtagaatgtttccacttctttgcctccaaccaatgaagtaaaattcaactgtggatgtttcaaaagttccttatcttcaccaaaaatcaacttactactaacactagaattgctattcctatcaacaagacaatacgaaaacgaatgaccatataaagattgaagctgagaagcaaacgaaagcggccctctccctaatcctaacaaaccagcagcaccatgaaataatcctctattccaatgaccacaaccaaacatcacattttccaccttcctaaattcactcccactcgtcgtcgtgaggttaacagtaaatgtctctagcgcgaaatcgccagtagtattagaactatcaccataccaatagtaataaggacaagtttgattctcggatttacaaagctgaggaggatcaggggatgtaacaaatttacacctaggatcatgacaacttatatttctaaatgaagtagagtcttgaggattataatgaggtccattttgttcaaaacaatcaaaacaaggaacacattgaatccaattaagatcactaccagtatcaagaattaaagaaaaatgcttaggtggtgtaccaacaaacacatccataaaatactcaccagagccaaggcttacacctgactccaaagtcgccattagtttgccggaaagttcataagattccagcgaaactgctgccggagcaatcacaggcttatgtttgtccacatgtttttcattactttttgcaagtcttgaattgtaattctgatttttcttctcaacaattcttgtatggagtgtctgaattctgcttaaatcccttgctcttgactcaaagactgaatccttagcctcaatttttttaccagctgatctgtgccttaactgaaactttacagcttcttttttctggtttccaaaaatggaaacttcttcattttctccattttttacatcaacaccatctacttcttgagctattgaatgggtttttgatttttgagaaactccatagttgcaatctgagtcagctgaagaagaaacagcattaaagcttggatggttagggaattcaatacccgaaacactagaatttagatttctgaagctgtaaaatcctccacaggcaacaaaaccagaggaaaacaagaatataaacaacaaaatgaaaagaatgaactttgtccccat

SEQ ID NO: 5 - DNA, 3496 bp, Nicotiana tabacum
ttacattgaggcatcaaggaaagcattagagacatcatctaattccacattcagatttttggctgaaggcaatccagccaccacattatgttcaatgccacattcatttgttcctcttctgatcttgaagtaaccatcctgttatcatagagatagacatacatttagacaagaagcttatacaaatagagtttaacttttgtgtattgatagttttcagtttgtttaatcattcaggctaagatgacttatgcaactgtctaaagtaattctaatttagtaactttaagagtgcagtaaataacttgctttaacttttaagatacacagatagtgtaaaaattatttacgctgtcagtatagttagcgcatctacaacaaggagttaggatgtcgatggtttaaggaaatttgtgctcatatatgaaagcataaggagaaaatagagtacatacatcaccccagcctctgttccaagaattagcaataagctgcagaagataattaaaaaaaaaggtgatgattagattttgataaaatgatatgattttagatagaaaataagacaccacaacttgaacacatcaacatacccaatagtcctctccctgctcactggttccccatccgataagcttaacagcatggcctcccatactttgccctgttacatgcttgtaaactccagacttgtagtgagcaaaatcctgtgattgacaaaaaagttttaagtcattgggttagcggaaagcattgctaagaaaaagagaaaataacaattataatcaacgagaacaatcaaattcaaacaagcattagtttatactagagaaactgagaaactaacaattataaccagataacttctcatattgtgctaagcattaaattatctcatttacaagtattaatttgcaagtaaatctcggacaacataaaatgagaaggtacatcggtagttaaagtttctcaattatcataatagttactatcaggtcacttaaaagatcattacatgtatcacattatgggattggcaggtaattgtttctatgtacacataccacaggaccagcatataagtttaccagctcagacaatgtcatgtgtgaaaactatatcaaataattttagtatcagaacttaaccctcccccttatcctcattacctcgtagacggtaaaagagacctcgactggtccatttttgtaaatttctgtcatgatactgttgggatcatggtggatcctgtatgcattgacaccataatgctttgatttcccccatagtagaatctccttcacacacttcctctgacactttggggtgggatatcctggttcacaaccagggtgggaacatccctcattatcaaagtaagggtcacactgccagaaaaaacaactttattagtgattgatcataaagatccacggtagctaatggttttagaggaagctgtaatctcttttggtgaaaataagtcaccatttacctcttctgtgaccacacccctacggataaagtatcgccatgctgttattggatatccaccatcacaaccactcccacataaaaagccacagcatgctaacagatcatttacagacagagagatattctgcattacacattagaagtttaacatcagtgaccataactacagaaatagattcacatacgttttgtgctaggtgagatggtttccacatgcttagaccatgaaaaagaatcatgaggctggcacgtgagagcacttgctgaagatatataattaagtacataaaaatgtgtcatctaaagcttttaaatgaggcggtcacacagttcaacaaaatttaccaagttatgatggatacagaaacgatcagacagcgattcaacagcaccaaaagcccaacaagaaccgcaatgtccctgatctgtgacgcaaatttgtcccggtgattgatgtgcaaagacggaaagcattaggatcactatcatagaattataattcaatagtagtaagcaagaacaagaagagactgacccagaattcttccgatagtactacattgaggccaagcttttcgtgcatcaaactcttttggtagctccaaaagttttggatgagttagaataggaattccctccaaatcaccttctcttgcgggcttaactccaagaaggcgcttaaattgcgaaacctgtgaaaaccaaagaaaaacataattataaatcgacgttttcggtgtatggctgcaaaataagcaactgttattgatggttagagaaagcgctaagccatatgatgatctgaccgtgaaattcgagaatcgagggttgaatgcagctttccacccagctttggcattttcattaacctctttaatgattgattcctacatgattatccaaaaagctctcttagttttaaatttgaagcaacaagggcaataacatcttctctaaacatgaaaagaagaatatacctgaaggattgcagattcaactttagcttcagatattggctgctctgcaacaacctgttttccataagaacaaagagattctactcatcaaaagacatccttaaagcttttaggaaacagagctgcaactccaggaacaaaagcatgacacaatgagtgacaaacgaagaacttcgggctcgtttggtacgagggataagggataattaatctcgggattaaatttgagatgagtttatcccatgtttgattgtagtgttattttaataattatgggagggtgggataaacaatcgcgggataactaatttcgggataattaatcctgcgaaccaaacaatccctaaaggtttcactttaatcaagatgaaactcttccacaacttttattttcaacattataatactattagcctggaaaattaatcaaaagtttgtaggaaattcatcatatgtctaaagcactataacgtagaggaaaaagaatcatagaacaagcagaaattgtaattagtccattatttctcctccttcttctcccctttctgtatttctttgtgaagcaatacttcctctcatgttattatatttcgacaagtaagttagctaacacataacataagtaatttgcatcaaaccatataattaacttcagaaacatgtgtatacttctcttttctcattctcactaggtaatgagaaaatcattaaaatttgcttctactcatgatttctagtcaacgcttaactaaagcataagaagtccaaaatacccaacaatatttgatctttctgaagaaacacaaaaaggctaatccttgtgttcatcaaaagctatacaaatcaaatcaatacgctaaatccacctaaaacaaaatcatcaattcaataggcaagaactacccataagacatactcctactgtgaaaggttcaaagaatgaagaaacaaacctgcaatataaggataaacaaagcaccaaaaagcaaaggagttgctaaagacttcagggtcaaggccat

SEQ ID NO: 6 - DNA, 4209 bp, Nicotiana tabacum
acattagtcctccatacttctttctatcttcttctgtcagtcgcatctcccggcgactgtctcctcctctccatttttcctttctctttttcctcaccgagatattttccctataaacaaaacaccgtaaaaatcatctcctctaatttcctattttccccatttttccaaatgggttctttcctctgtttctctgtcattgttcttttccttgtttttcagccatgtttttccaagaaagtttacattgttcacatgaaaaaccaccaaataccttcttcttttgctacacaccatgattggtacaatgctcagctccaatccttgtcctcttcttcaacctctgacgaatcatcacttctttactcttacgacactgcttattctggctttgctgcttctcttgacccacatgaagctgaactactccgtcaatctgatgatgttgttggagtttacgaggatactgtttatacacttcatacaacaaggactcctgagtttctggggctgaataatgagctcggtctttgggctggtcacagtccgcaggaactcaacaacgctgctcaggatgttgttatcggagttctcgacaccggtgtttggccggagtcgaagagctttaacgatttcggtatgcccaatgtgccgtcgaggtggaaaggtgaatgtgaatcgggtcctgatttcgatccgaaagtacattgcaacaaaaagttaatcggtgctcgatttttctccaaaggttaccaaatgtcggcttctggttcatttacgaaccaacctagacagccggagtcacctcgggaccaggacggtcatgggactcacacatccagtaccgccgctggtgcaccggtggcgaacgctagccttctcggttacgctagcggggtcgcgcgtggtatggcaccgcgagcgcgtgtagctacgtacaaggtgtgctggcctactggttgttttggttctgatattctagctggtatggaacgtgctattttagatggcgttgatgtactttctttatctttgggtggtggatcgggtccttattatcatgatacaattgctattggtgctttctctgctatggaaaaaggaattgttgtttcctgttcagctggaaatagcggtccagccaaagcttcacttgcaaatacagctccttggattatgaccgttggtgctggtaccatagatcgtgatttccctgcttttgctactttaggtaacgggaaaaagattaccggagtttcgttgtacagtggaaaaggaatgggtaaaaaggtagttcccttagtttacagcacagatagtagtgcaagtctttgtttgccgggttcacttgacccgaaaatagtccgtgggaaaatagtgttatgtgatagagggacaaatgcgagagtagaaaagggtttagtagtgaaagaagctggtggggttgggatgatattggcgaacacggcggagagcggcgaggaattggtggcggatagtcatttgttaccggcggtagctgtagggaggaaattgggtgattttataaggcagtatgtgaagagtgagaagaatccggccgccgtgctcagctttggtgggacggtggtgaatgtgaaaccgtcgccggtggtggctgcgtttagttcaagagggcccaatactgtaactccacagattttgaagcccgatgttattgggcctggagttaatattttggctgcttggtctgaagctattgggcccactgggcttgaaaaggatactagaagaactaagttcaacatcatgtctggtaagtattaccaacaacggctagtttttgtcataatctttttatttatgcttagattaattatggccttaattatatttttattagatcttgcaattattaatactaatcgtacacacttgaaaggaaaaagaggaacatgtttaattagtgcgtagtgatctggagcacatgcctaaagtttagaggggttcacatgtgttgcattgataagttaatcctaaattacattagttataattaaatattaatgcgcttccaagaaaaagttgactaaatttatcatatatttccaaatttgttttgaaaaatatgattttggtgaagtttggcttgaagatgaaaatgtgtttggacatcaattttcaaaacatatttcccaaatttattttggaaaaacatgaaacatttcttatacccacaagtttaaaaaactatcacaaatatccaacggtaccattatcaataacattcattatattatctcaaaccataatcctgaatataaataaatttggcacaatattatcatttttataattaactatatgatacactattagatgatcgagaatacgaagcaacatcgtttcaaaataataaatgaaaaatggtggactcttttatataatacaaaagtttggaataatttttaaaaaatataataatgatattttgacccaaaaccaacatgtagtcaaaatctatgaccaaacatgtgtttgccaaataaaacccaaatttattttgacaaaatatatggccaaacggggcttagttgtatgatgtgtcgtgtgatattaataaaagaactgccgaagcctataccaaatttatggctaaaatagcaagaaacgtccctttaacagggacagaagaaatccaagagggggctcgctggtctagagaaaaatttattaattaatttcaataatacgctgatggtgtaaaaaatattgacaccatcaatatattgtaatatatcgtaaaagtttattaatttcacttattatagacaattatttgaagttatctttatagctaacccaatagtgtaaaattcatccgttggaatgtgcaatatgatgtttgttttcagcttttgtgcagtagtgattttaaataggtattacttggagcttttgtgcgatgtgacaaagtgcatgtcacaaggttagagtcataatgaaggcaaaaacatgatatttaagtgaaaagtgatagagggacgagttcattgtccgcacaaaagcctgatatttaagttaaaaaaaataggtgaccagcttgatatttaagtgaaaaaggatagaaagacgggttcattatccaccgaaagtcgaacctaaccttttgccatggcctttcttggtcatcaaaataatttaggagactacctaggaaaagtagtatggtctgtcttccactagtgggtcataaccttaatatcatcccccttgccccgttgagtactctggacctatcttaatcacttcattagctggaaataagttgatgaactttttgaatcattcttgaaaattcacaaattcgaaccgtggaaacaatctattacaggaatgcagtctaagtcttcgtacaatagaccctgtggtccggcccttatagcaggagcctactgcactgggctgacctttttctttaaaatcttacagagctcaaaatttggactttgtactgtttcgttacattatttgatcctttttgtacgtcaaactctttcaggcacatccatgtcctgtcctcatatcagtggcctagctgcacttctgaaagcagcgcatcccgagtggagtccaagcgcgatcaaatctgcacttatgacgactgcctatgttcacgacaccaccaactctcctctccgtgacgctgaaggtggccaactctccactcctttcgctcatggatcaggtcatgttgatccccacaaggcactttccccgggtctcatctatgatattactccagaggactacatcaaattcttatgctccttggactatgagttgaaccacatacaagccattgtcaagcgcccgaatgtcacttgtgctaagaaatttgcagatcccgggcagattaactacccttcgttctcagttttgtttgggaaatcaagggttgttcgttacacccgtgcagtgaccaatgtagcagctgcaggatccgtttatgaggtagtcgttgatgctcccccatccgttctggtgaccgtgaagccatcaaagcttgtgttcaaaagggtaggagagaggctgcgctacaccgttacatttgtgtccaacaagggtgttaacatgatgagaaagagtgcatttggttccatttcttggaataatgctcaaaaccaagttaggagtccagtctcatattcctggtcacaactattagac

SEQ ID NO: 7 - DNA, 3723 bp, Nicotiana tabacum
atgaatcctgaaaaattcacccacaagactaacgaggcccttgctggggcacacgagctagcactatccgcagggcatgctcaatttacgcctctgcatatggctgtggccttaatatctgatcacaatggtatttttcgacaagcgattgtcaatgctggtgggaatgaagaagtagctaattcagtggagcgggtattgaatcaagcgatgaagaagctaccttctcagacaccggctccagacgaaatcccacctagcacttcccttatcaaggtgttacgacgagcacaatcgtcgcagaagtcttgtggtgacagccatttagcagtggatcagttgattttaggactgctagaagactctcaaatcggagatcttttgaaagaagctggggtgagtgcatcaagagtgaaatcagaggtagagaaacttagaggaaaggaaggaagaaaagtggaaagtgcttcaggggataccacattccaagcactcaagacttatggccgtgatcttgtggaacaagcaggaaagcttgatcccgtgattggtagggatgaagaaattagaagagtcgttcggattttatcaaggaggacgaagaacaacccggttcttattggagagcctggtgtgggtaaaacagcagttgttgaagggctagcacagaggattgtacgtggtgatgttccaagtaatttagctgatgttaggcttatagcattggatatgggagcgctagttgctggagctaagtacagaggtgaatttgaagagaggctgaaggctgtgctgaaagaagttgaagaagcagaagggaaagtgatacttttcattgacgagatacatttagtccttggtgctggtcggacagaagggtctatggatgctgctaatctgtttaagccaatgctagccagaggtcaattacggtgtattggtgcaactacacttgaagagtacaggaagtatgttgagaaggatgctgcattcgagaggcgtttccagcaggtgtatgtggctgagcctagtgttactgacactattagtattctccgcgggttgaaggagaggtatgaagggcatcatggtgttaaaattcaggacagagctcttgtggtggctgcccagctctcatctcggtacattacaggtatctatacttttgctatttttacatagcaccttgttttgatgtcttttctccgtcaataactaagcatgtatatgcactactttttcctcgtgcatttcattaactctataaatcagaatgggacttagattcggttaagcgaatgaaggtgaattttaacctaaaatgttatggtgtcggagctatagatgtatatttgtctggtactaaaatgacttcttgaagcagtagccagaattttgattcatttaagcaggtagggcatgagacttaattagcatatcattgtctgcacttccttctggacctttaccagtgtatgagttgtttttgtgttacaagctgctccccatctggataatggtggattaagacttatatgattgtcagaagtgtactaaaacttcttgaggataattaaaaattgctcaaatcaaatccgtagctcgttttccactgtcagtttttgcaaaatgctttttatgtctgtgtcgtgacaaattaagcagtcagccagttaaattttggcagtttggcatgcaaattgtctttgctgcacatttcaggtgcaaaaatcactaacctctttgtattttcaggtcgacatctgccagataaggctattgacctagttgatgaagcttgtgcaaatgttagagttcagcttgatagtcaacctgaggaaattgacaatctcgaaaggaagagaattcagctagaagttgaacttcacgctctcgagaaggaaaaagacaaagctagcaaagcacgtctagtagaagtaagtattatatactaccaatgcttttactggtaattgctctattttctaaaagatatgttaagaattatactgactcgaattatactgacactggtccaggtgaggaaagaacttgatgatttgagagacaaactccagcccttgatgatgaggtacaaaaaagagaaggaaaggatagatgagcttcgcaggctcaagcaaaagcgcgatgagctcatttatgctttacaagaagctgaaaggagatatgatctggctagggcagcagatctgagatatggggcaattcaagaagtggaaactgcaatagcaaatcttgagagtacctcagctgagagtacaatgctaacagagactgtgggtcctgatcagattgccgaagttgtgagtcgctggactggtattccggtctcaaggcttgggcagaatgagaaagagaaactgattggtcttggcgataggttgcaccaaagagtggtcgggcaagatcatgcagttagagctgttgctgaagccgtgttaagatctagagctggtttaggaaggccacagcaaccaactggttcattccttttcttggggccaactggtgttggaaagacggagctcgctaaagctcttgcagagcagctctttgatgatgataaactgatgatcagaatagacatgtccgagtacatggaacaacactctgttgcccggctgattggtgctccaccagggtaagtttgaatctaattcttttcttttaatgtcatgtcatattattacagtattcaatcacagattctcatgtgttccacatctgcagttatgttgggcacgatgagggaggacaacttactgaagctgttaggaggcggccttacagtgttgtgctctttgatgaagttgagaaagcccatcctacggtgtttaatacattgcttcaagttttggatgatggaaggttaacagatggtcaaggccgcacagttgatttcaccaacaccgtgattattatgacttcaaacttgggagcagagtatctgttgtctggattaatgggaaaatgtacgatggagacggctcgtgaaatggtaatgcaggaggtaaatagtctcaaactagtaacttcccctttgctgataaaactggaagaatacagtgaaatagtttaccttattagctagaatgacaactgtttacatgtgtgtatgctttgtgataggtgcgaaagcagtttaagcccgagctcctgaatcggctggatgagattgttgtgtttgatcccctgtcccacgagcagttgaggcaagtatgccgctaccagatgaaagacgttgcactacggctggctgagaggggtattgcattgggtgttactgaggcagctctagatgtcatactctcagagagttatgacccggtaagtgttatatcttgtaatctagtccaatattttaggattattttgcgaacttgtacttattgtggtgatcatggcattcaggtttatggtgcaagacctattaggagatggttggagaggaaggtggtgaccgagctatccaagatgcttgtgaaggaggagattgatgagaactcaacggtttacatagatgctggtgtcggcaggaaagatctaacctacagggtggagaagaatggaggtcttgtgaatgctgccaccgggcaaaaatctgatatattgattcagcttcctaatggtcccaggagtgatgctgtccaagcagtcaagaaaatgaggattgaagaaattgaagaagacgaaatggaagat

SEQ ID NO: 8 - DNA, 7187 bp, Nicotiana tabacum
ttatgtaaatgcttcacgttgctgtgtaggtagctccagttcaggctcaaatgctgttagccgagaaaaatactgatctaccatgtcatctgttactttatccaagcttggaggatcccactgcacgttttaacataaatcaagaaactctctctaaggttaaagttgactcttaggaaaattcctccaggaaggggctcataattcataaaaatagcatattagttcgcaataatattgatttaccttaggtgcaaaatctctatccacaagccgtgcacgaaccccctgataggaagatattagtacactgtgatgatgatctgtggaatttagtactgagactttttttagcagcatatattacctcacagaagtcattagttatttgtccagagaaagcttgtactgacattcgatactcacgaattagacactggtccagagtctgatgtctgccttcgcgtatctgatcagaagcattattggaaggtcatctcacaatgccctggtggcagaagggaaaaggagaacattctatctagagaaacttacagatctcagtgaaaccttcaagctcagtggggctgtttcttgtagttttcgcaatgttgaaacacaccatgcatcttgcttcttggctgcctcactttcctggcaacatttaaatttctttttaaaaatgtaatcacacctgtccttaaaaacttccacacatgtagcagactttatatgtttacttaaatactttactgtcagtattttaaaaacaagagaaaatccatctcgctcgaaagagcacccagaggtcgtagatgcaaacgcaatgactcagcttgtactatggtgcaacaaagtgcagcacttaaaggcttctccgtgcaatttatacgtgatgttagaatctccacaatatgctttgcccaaagaatgatagatataagttagtgtgacaacagccccaggacctataggtactttttgaacctcaaggagcaaacaaagagtatgctgagcaatgatcattgcattgtttcagatttttcaaatagtggcaacttgtgatggccgaggtattaaaagcaaagcaatccgatgctgaacattattgcattgatcaactaaaatatgtttccactggcacctaagggggtagactgtagccaaatagtcaatgaagtcggtgaaaaacacgggagactaggtttcaaatctagcaaagagtcggagagagtcagagacagaaaggctaggtgatttcttcctatctgcctaaaatttggtagatagcaagtacctgttggaatagtcgaggtgcgagcaaattggcccacaccaccgttatagaaaagaataatgtttctactggccacactttgattgtatgcccatccgatcgagtttcttaccaggtaatagccttcacaccccaggctagtgaattaagatgtgctatcctataaagacttacttcgtcctccactaatatgatcgtatcttgttactggagtcgaagatggtatgttggcgaggcttccaccttctgaataccacatgtttaatccctgttctttcttttctcactagagatattaagcaaattaaaatcaattaacatcagaattttgtatctttcagagaccttttcagtatatttgggaaacaagttacacactcaggaactatatgctcaccaaagcatcaataatttcttcgactgtgtcatggctgaaacatttattgagagtttcaatcctaaagaaagagaaaagatggattagattaagctatcaaatactcattgatctgcaagcaagatcacacaaacttgataagaatttatttttataaaaacaaaaggttaaagaacaagactaaatacaaaaaccaaaagatccatgtgaaactatgacaaaaattatcatgaaccacaaagttttaagaatgtagtgtgaagttttagagagctgaagtttgttccactagttgatgtattttatataactcatggaaaagatggtgccactaccagtttctctataatggaaaaaacaatttcgccacttacaaatctaagtgaagctaaatatgaagagctaattgcaggattttgtgtttactgaattaaacaatttaccaaaaattaccaatttgattcctcgaagaagaaagtaagagattgatttgcaattctttctttttgagtagtatgaaaaatgttatgaaatgagggcaagtgtctcatccaattaaacctgtaacttgctttccaacagcaggtaaaatattgaagcaaggctgcagcgtgtccacttatgatttcaattagccaagggattctttcgatgttctataagaaacgtgaacgggattccccgaagatgtaggtagggaatccgctgactggtgtggtatatatgtttggttaacaactagaaaaggtgtttcaaatccaaaagcagcccttaacattaaacggtaatatgtatcagtccaccccctttcaaactgtagcaggaactaatatatttatggacattccaatttccatatttagcaaggatgacaggtacctgtgaagtacacttgttggatctggatggacaatctctccacaattttcaagagatctttcaatcactgaaggatcatcagtcatcaatttaccaagttgttcctcaattaagggaagcttctgagaggagtggagaaggcagagaagaagttttcagagcaatagtcaaataacctaagtaggctattggtacctaggtgcaaagcaaattaagcaaaggtagtagacttactgcactgtgtaagtagtgagtagcaagcccacaggatatcatttctgctccattgatcttgtctccagttagggccaggtactctcctgcaaattgaaaacatttaaatagctttcttccatgctgattttttctttcatttacgcagtagcaaatgtccaaacagatgagagacacagagagaggcagcatactaaaaacatattccacttgaaccacaaactagtatagcataagatagatagggtttacatgagctgacatgcgtgcatcaggttgcttaacatttatatgccatagaatatgaagtcatcaaagagtcagccatgtaaatgcagtgctacatgatctagcatgagttatcagttatctacaaaaaaaaggcttgtaacccactaattttagtccgccaccatttaaagctaaatattaaatagatagaaccacatattaacatcaccgtatgaagttaaatttttaaaaaaaaaggcagtccagacaaattccgaacataggtagaattcaaagtcataatctccaaaatacatgaaacaggaggaggaacacatgcttacttcccaatgagttagggaaaaataagatgaagtaaaaagaacatcacgttagtacaaatattttgataacaagcatataagaagggaaacgtccagatatgacatgcttattttttccccatagaagatgcgcatctccccagagaagaggagatcggggaagggggtgtgtgtgtgtgtgtgtagagagagagagagagagagggggcgcggggatcagaaaagtagtttccaactagataattcatcatcaaagacgatcagctacatgacatgatagaagttactgatggatccaaaccacagcatgagatcagcaaaagaatatacccaaataaccagggaggtgtgaaaggtaaaatgacgccccagcatcgggatggtaaccaatcaatgtttctggtgtggcaaaaacctacattgatacaagacccaatacccttgtaagaacggtgaaaaatcgatctaacagcacttaaaacacctaaaccatcacctcgtgcaccggccaaatttgatagacctctttgacaattaagttcgataaattttttatttcctgcacattcctttagttcttgagtaatttaaaatcaggttatagcatttcagtaagaccaagatatcttaaatttttcagcactttaaacgctaagcctgtggttataagtcatatataaccgaaataaacaagcttcatcacgaaaagtcaaaagaattgataatatacaattgaaattactatttaacttattggtacaaagaaacttcatcaatatagagcattcaatttaagaagattaaaagatgaattttatcaaattaactcggtacgaactcataaatagataataataactgataaggccaaaactatcaataaaggaaaagcaagagaaggggcagaggaaaaatttgctgaataagtttgtagcactaggatttgaacttctctctgaagagaaataattaagatttaaagaacagaaaattcatgatatgtgaagtcactaagctgtatataagaatgagcacaaatggaacttcacattacttagcaatgtagtctagcagttcttgaagtaggagaatttattctgaaccaacaaatgaaaagcttaaacaaataaagcatgactaatcttttccatacagttttctcagttgcaacacggaaagttccaggaattgagatgccagccccaccacccatggtaattccattcaaaagagcaacctgcatatggcatctgaggattaatatctatacttgggaaccgcatccagggaccagctaatgtcaacaaaagtatgacaagtactgaatatgcaatgactgaattccttcaacatggaattgaggaggtgagagcgagaagtaactcaaatccgaaagtgcgcaaaaagctctaatcgataaaaagatacaaagaaatatggatgataactactgataaatgcacaccgggtttctgaactaaaaaaagacgtatattatgattaataaaagaatgaaaagaccattatggctgcatcttgtcaaagcaaaaatgatcacatgattttaacaaaataaacaacttccaaaattgaggagatattatttcatgggcaaaaaggaacagacaaactataggtctaaacaggtgaccactttgttgagcatcaacaacagcttatcccaaatctttcatttcagaagtcaaagaacacagcagcaagagaactatggatgaactaagaaaatggagttgaatatctatgaataattggatcaaatttgcatttgtcctaaggaagttctttaagcttatgaatcataatgttaatgtgactgattatgttttcctcaacaggcatcgttatgaagattgtatagcagccagcatgataaagtagtgttgctaccatttcaagtttatgaataagatccaatcaaactttggcaagacacatctaacctctctgaataccattttaattcagaaagaagtgattggtgtaattaactgtcgagatgctgtctttgcagcagcttagtcacagtaagatgagagagaatccaattaacagaacaagcgatcttctaataaatccagatatttctataagagtatctttaaaactgccagcataaagtacaaaggtgttgaaatttcaataagcaatggcgaatataggatgaaaatgttgattcaacatctaatagaacttacatatattttttagaaattcttaggttccaactacagaagcatattttattatgcggaagtctagacgcacagttagatcacaacataaaagacatgtaactacaaaatttataagacgctggcctctatcaaggtttagtaaatacaacaaaagttcctgatacatatataagaggcagaaaacagaagaaaattcaagtcaacagttcttttagtatctgatgtttgaacaataatgatacttacatgtggcttcaagagtgtgccgacaacgtatactaagttatttattgtccaacaaaaatctttacagtcttgaagattccctgcatctatccaatacaaaaaatattacacaaagaatggagaagatcaaattaaaattgaggtaatagtaaattggtagcatgaagatgccggctgcagtttttaaaacgatgtagaaacgttttaattgttcccaaaaataaatagatatcaataccctactcaataaaaacaacagaacatccagctatcagcacaaatagcttaattaagataattcacatctaaacaacttcttcacaccccaataatacaattatcgacaatgtttaaatatttaaaattcctttaaccatgtatcacttgcaacatagcagaatatgaacaagttcgccgtgaagtacaacagtcaaaatgacacaacataccttgttttaacaaattataaatagtgacaatgtcacccccagcagaaaatgccttgccacttcccttcaaagttaaagaataactgagttgctactcagtagattaacatatgtaacttcaccttaagataatccagaagaacaacaataggaaaagccataaaataattcaaacaataatttacttaacaaattaccttcaataccacgaatccaatatcaggatcatcttcccaatttttgtacagctttagcaacctatccacctaaacaacagtatcatgcagagtttttatttattatacaaggtggaaattaagattgccaaccaactggaatatcaagattccccagtgtcatgtagggttcattcccaaagccaaaacaaaatcaattcagcataaaaacacgattttgatggttggatattaattaaaacacgattttacttggtgggtatcaataaaaaaaatccaaaaagagagcaatagatttcaaaaatgatcttcttgtgcgtacacactgtagatttcaaaaatggcaaaaacagaagcaaaaagtaaaggtctttaaaaggcaggaaactaacaactgaaaaattgagagcatttaacgcatggggtctgttaaggattgctgttctcgaagaagcttttccctccactaacacctgaaaaatgcaaactcatattttataacaaaatggaaattttgataatgaatcataaattggattgacaaattttcttttaaaaaaaattcagaactcacagtgctttgggattcatcaacaagggcattggtagagacactgcaaaagcttctggagtgagaaaccaagcgcgaattctgcagtaagcgcctcaaaatacttgctgatttgaagctctgcat

SEQ ID NO: 9 - DNA, 3498 bp, Nicotiana tabacum
atggccttgactctgaagtctttagcaactcctttgcttttgggtgctttctttatccttgtattgcaggtttgcttcttcattctttgaacctttctacagtaggagtatttctaattatgggtagtccttgcctattgaattgatgattttgtttaggtggatttagcgtattggtttaatagcttttgatgattttacaatttatatggattacccttttcgtatttcttcagaaagatcaaagattattgggtatttaggacatcctatgctttagttaagcgttgacttgaaatcatgagtagaagtaaattttaataattttctcattacctagtgagaatgagaaaagagaagtatagacatgttcctgcagttaaatatatggtttgatgcaaattacttatgtgttagttaacttacatgtttctatatataacatgagaggaagtattgcttcacaaagaaatacagaaagggcagaaaatggacgaaaaacaatggactagttacagtttctgctttgctctatgattcttcctctacgttatagtgctttagacatatgatgcatttgctacaaatttttaattaattttccaggttaatagtattataatgttgaaaataaaaattgtggaagtgtttcatcttgattaaagtgaaacctttagttctgcgtttgtgacccactgtgtcatacttttgttcctggagtttcaactctgtttcctaaaagcttttagcttgtctattgatgaatagaattgatgtgttcttatggaaagcaggttgttgcagagaagccaatatctgaagctaaagttgagtctgcaatccttaaggtatattcttctgttcatgattaaagaagatgttagtgcccttgttgcttcaaatttaaaacttaagagcgctttttggatgatcgtgtaggaatctatcatcaaagaggttaatgaaaatgccaaagctggatggaaagctgcattcaaccctcaattctcgaatttcacggtcagatcatcatatatcttagcgctttctctaaccatcaacaacagttgcttattttgttgctatacactgaaaacatgcatttataattatgtccatctttggtattcacaggtttcacaatttaagcgccttcttggagttaagcccgcacgagaaggtgatttggagggaattccacttctaactcatcctaaactttcggagctaccaaaagagtttgatgcacgaaaagcttggcctcaatgtagcactatcggaagaattctgggtcagtttcttcttgttcttgcttactactattgaattataattctatgatagtgatcctaatgctttccgtctttgcacatcaatcactgggacaaatttgcatcacagatcagggacattgcggttcttgttgggcttttggtgctgttgaatcgttgtctgatcgtttctgtatccatcacaacttggtaaattctgttgaactgtgtgaccacctcatttaaaagctttagatgacgcatttttatttacttatttatatatcttcagcatactctctcatgtgcgagccctgattctttctcatgggccaagcacgtggaaactatcttatattagcacaaaatgcttgtgaagttttcactatagttaatgtcactaatgttaacttttaatgtgtaatgcagaatatctctctgtctgtaaatgatctgctagcatgctgtggctttttatgtggatccggttgtgatggtggatatcctatatcagcatggcgatactttatccgtaggggtgtggtcacagaagaggtaaatgttgtcttattttcacctcaaaagagattacagctttcagtaaaaccattagttaccgtggatctttatgatcaatcactaataaagttgtttttattcttgcagtgtgacccttactttgataatgagggatgttcgcacccgggttgtgaaccaggatatcccaccccaaagtgccagaggaagtgtgtgaaggagaacctactatgggggaaatcaaagcattatggtgtcaatgcatacagaatccaccgtgatccctacagtatcatgacagaaatttacaaaaatggaccagttgaggtctcgtttacagtgtacgaggtaatgacgataaggaagaatgttaagttctgatcctaaaactatttgatacagctttccgtacatgacattatctgagctggtaaccttatatgtggttgcctacctatcccaaaatgagatacatgtaattatttttaggtgacctatagtgtaactgttatgataattgagaaactttaactaccgatgtaccttcccaatttatgtttgcccgagatttacttgcaaactaatatctgtaaatgagatatttaatgctaaccacaagacaatatcagaagttacctgttgtcgtaaaactgcatcatctctttctcggtgcaagtagatttgtttagattttgtttgttgtctttgatcataactgttatcatctctttttctcagcaatgctttcctctaaccaatgagtcaattttttttattttttttttgtcaatcacaggattttgctcactacaagtcaggagtttacaagcacgtaacaggtcaaagtatgggaggccatgctgttaagcttatcggatggggaactagtgaacagggagaggactattgggtatgtagatgtgttcaagttctggtgtcctgttttctatttaaaagcatatctttttgtcaaaatctaatcaccttatatatcatctgcagcttatcgcaaattcttggaacagaggctggggtgatgtatgtccttaaattcatccctatgttttcatatatgagcaaaaagtccttagacataggcatgctagcttcttgttgttgatgcactaactggcacatcaataaatggatttcaacttatataaactaacaacgtaaacaatttttgcactatatttcaactggtaaagttatctctgtgtgacctattggtcacgggttcgagccgtggaagcagccactaatgcttgcatttgggtaggctgtctacatcataccccttggggctacggcccttcccaggaccctgcgtgaacgcgggatgccttgtgcaccagactgccccttttatattttaaccagttaaggcaagttatttactgcattttttgaagttactcatttaggattactatagagagttacatgccgtcgtatgtcatttaacctaatgatgcaaataaattgtatactattttaatgcacagaagttaaagtagcttcttctctaaatgaatgtatatctccaatatgacaggatggttacttcaagatcagaagaggaacaaatgagtgtggcattgaacataatgtggtggctggattgccttctgcaaaaaatctgaatgtggaacttgatgatgtatctgatgctttccttgatgcctcaatg

SEQ ID NO: 10 - DNA, 3872 bp, Nicotiana tabacum
ctataccatcatacccatgttggaatgtgccactctgacaacaagtggagatgttaccgatgttcttttgttcctccatgtcaaagaaccaaatacatatccctgtgttggtgcagccaccttgaagttcactgtaaaattcatcttctggtaatatctagtgaaggctaatcttcggggaaccacagtgacattgacacccgtaggtgcatagacaactgccttgtaaatgcttcttgcttttcccacgttagtaacagttcgagttactgaatatgtgcttctgaggtttggtattgtgatggagggataatttagtccatttggtgatgcaaaggtttgatcacaggtgctattgtcccttgtaatcagatgcagagatttctcatcataaccaattgaacaaagaaatgctctgtaatctgctggctgtgcatcgtatataagaccaggatccaggacattcgtagggttaacaaagccagaaccaaaatcaaatggagtagctctcttcccttcaggatctactattatgggtttgtgatgcttatctgacagtttagctgcattaatattgatgagattagtgcattgaaggcttgaatgaaagagttagattatgtaaaagcttttattctacctgtcgtcatgatcgcggatttaattgcagagggagaccaagatggatgcacagcttttaacaaggcaacaactcctgttatgtgggggcaagccatagaagttccggatagtacattgaagttcaacttagtagaagctgctggagaccatgctgccaggatatttaatccaggagctgcaatatcaggctacaaaggcaaatcagccaggaaattacttgcaagaaaaagccaaatcctcaaataaggtaagaaccaaagaaaatgcaaagtaacaaagaactaatccacaaccacattgacgatccaggaagtaaatatcaggatgcaacataaaactttgttggtctacatgacaaaggcagagagagatcattgttgaaaacaagtggcagttgaaattaagtccctatattactatttttagcgcacaaattaccttcaaaatttctggtgttacagaattaggacctcttgaagaaaatgctgctactcgaggagcaggttgagctcccaaaacggttctagcagagagaatccttgccatggggaggctgttaatataataagatgtgagattgggaagagatgatagttaacaacatcaaaaagtcaagaagaaggaagtgaaccgtgtattgttaatgtaagctaggatcttgtttccaatctttttcccaacagttgctgcaggaatgacaaaagggatggccacacccttgtctgcgtcatctataaggatcatcccaactccaccggcttctttaactataatgcttttctccatctttgactcacttgagcttccagcatgtaggcacacaagcaccttccctttggccttagttctattcaaagaactatctaagcaataactagtggaaaagagagggaaggaaaaaagtaaattaagataattgtcaatgcatacatatctacatttaacaaacagcgaaagtaccttatgattcacctggattgatagggagtgaagtatccagcataagcttcagaagcaggtatgattcttgtagatgtattcatttgagataagctaagactttcacccttccaaatatccacaacttaattagaaaatagaaattgaataataataacatgtaaacttgtcgaaaactgggattaccttgagccgaactccatttcctagtaaaatatcagaagtaaaatctctatcagttgaactggctgcaactgtgatcatccaaggagctaaatttgtggctgaaccagtgctgccttcatttccaactgaagccaccacaagtattccgcggctaacagcatgatatgaccccacagaaatggcatcattgaaataatctccttggggagcatcagggcccaaagatagagaaatgacatgaaccccatctctaattgcatcatcaaatgcagccaataaatcaacatcatagcaaccagaactccagcaggttttatacactgctatcctggccattggggcaccacctctggctcctccatttgccaaacctttgtaattcatattagctacgtaacgccccgctgctgttgaagctgtgtgactcccatgaccagaactgtccctagcagacttgtaaaacatggtcttcccattttcttcttcagcttcatagccactcatataatatcttgccccaattattttcctacataagacaaatcatattgcacttatcatctaaataacaaaagaagagatggttgccaatcaaaagaaaacctgttgcatatagaggcattgaatgcttctcctgattggcattgtcctttccatccagctggcactggaggcatgttggtatcactaaaacttggagactcaggccaaattcctgtttcattaaatatcttaagagcttaacctcaagttctaattagctcgaaaaacaagggaaacagtggagctggggaccaggttgaggataaactgataaggttgtgaacagagataatatttgcattgaaacatgtcactctaatgtatagtggctcttcccataaagtaacatttacaagtagttcaagcacactgttaggcataaatgcaaatggcaaaatatgggaagaggtgagaaagatgaactgggaagctaagaaattgcataaacttgagttttaaaaaaatctaagcaaacatatttcatcattcgaaaatgattgaaacaagaattgattgatgaaaggaactactttcctcaggttcagccatatgtacccaaatgacaaacttagcacttttgcaaagtcatgttattgtactcttcttaagaaaactaacagagacaagagcccttttaagtgacaatacattaaatgaagggaccaacactaacttggttggtgcattccatcattaaacgatcatatctttcacctaactcggaaaagattgctagaatttaagataattaaagcaaaaggaacagagaaaccacctgtatcaatgaaaccaatgattacattaatttggttcttggtagaaaaacctggaatttccattgtttcatcatcactgagccccataaaatcccatgaatgagttgtgtgtaggctcctcttagtatttggaaacacggataccactccaggcatttctgttttattttaacattaaagacaaatttctcagtacttattcatatcattaccttaaagaaaaacatttggcatgggcttactggatatttcagaagcctgtgcctcagtcaacttggctgcaaagcctttaaaaccatgcctataactatatacatgtgaagtcttggcttgttcaatgctgtaaagttacaacttcagtttttttgctaaaagcaaccagtgtaaaacccaatgaaccagctcaaaaaagggaaaaaccctcatagctaaaggtaacaagaactgaccttcctttatgaatagcagtcagcatttgatggttttgcctcaaaatctcatctgggtgttcatcactatctttgcttcccatgtacaccacatataactggaaaaaaaaaaaaaccaagaacacaactttactaactattcatcatttcaaaacatcattcaaatatacaccctcaataacagcacataaaaacccatatcaacatacagactacagagccaaagtttatttaccttggaagaaaagcagaggctaatatctccaagaaaaacacaaagaaagagtaaaagaagagtcttttttagaacacccat

SEQ ID NO: 11 - DNA, 12103 bp, Nicotiana tabacum
  misc_feature (5977)..(5981): n is a, c, g, or t
  misc_feature (7278)..(7426): n is a, c, g, or t
atgggagcaaaagcatttcttgttgctatgtttctctcagcactgttatttccttttgcctcctcatccaatgatggcttgatgagaattggcttgaaaaaaatgaaatttgatcaaaataatcggcttgctgcacgcattgagtcaaaggaaggggatgttttgagggggtcgattaggaagtataacttccgtggtaaactgggggactttgaggatacagacattgtagcattgaagaactatatggatgctcaatactttggggagattggtgtaggcactccacctcagaagttcactgtaatctttgacacaggtagctcgaatttgtgggtgccgtcgtcgaagtgctatttctctgtaagcttctatacatgcaaatgatacaaaggatagcattgaacatccatcttgagtgatgtaaaatttgatgactgcctatcttggtgtaggttccctgtttctttcattccaagtacaaatcaagtgaatcaagtacttataagaagaatggtatgttatgtttccatttttgtatattgcttctctctaccatctggttgtttattgctgcatgaaacatatatatgcttccttctagtgccggttattgtttagaatatgtgccatcttgttcattttagaacactttttgtattgtccttatgtgtttctcacggtgcatcaagggattacattggaaaagttaaatgatgagtacatgtagttgactgttgagacataaaaagaggctgtttatgttatgtttcttagtatattactgtaactagtgaggttccagaaaagaaacaccaatatccttatctctctctgcgattagtgctttttggttgcgagttgtatagttttaacctctgcaatgcctctttaggtggcctttcttcttccctattaactaggttttgtatccatgtcttggcatgtctgtgacataagaaattttccgcagaaaactagttattcttgatttttttgttctattacaattatatatgttgctcaaagaaaatgaattgaacagtctgtagcaattgaatgggtttgccagatgagttcactccagtgttattgaaggccattgcttggtcgtttaaagttatgaagcgatacagcaagggctatcgcttcatcgctgaagccatgcactttagagaagtttgcacttcaaataatggtgcacaaagtgattccaacgagaatttattgtttcattgaacatcaacttttagaagttggattaatgttggcattttcacaaagtgattcctgttgggtataaaaataatattcacggtattagtgataaacgcggaacactaagttatgcttaaatcagtaagaataaaaatgcagcaaaaatgacaccaagattttacctagaaacccttctgaataagggaaaaaccacggccaagaagagcaactgatatcactatagcgaggattttacactgtgtagtaacgagtacgaatactcctaagaccactacaccctcaaaagaaataaacactcttttgctttttcacctcactacaatatctctcacactctattttctttacaaactattttcttatagtttatggaataccttgctctctcttttttctctctttgttggtgtgtagaaatgagagttaaagctctccttttatagccaaaacctcactctctaaagcctacaatatttgacaatttgcactcccttttcacaatttcaacaaggttggctaccaaaccaaaccaaatcaataaaattgtctaccaaatcataccaattcaacaaggttggctaccaaaccaaaccaagtcaacaaaattggctaccaaatcatttgaatgagatggaaaccatatcaatctccccctccagtctcattcatctagaggaggtagcactgtcttctagtctgagtgcatgccgacaagttctttgcatagctcgaacttgtctcttggtaccaccttggtcaacatatcagcaggattttcacttgtgtgaatctttttgacctgaagtgattcgttctccacttgctcacgaatccaatgatatctgacgtcgatgtgttttgttctcgcatggtacatggagtttttgcttaggtctattgcactctgactgtcgcaatagacaacatactccatctgttgcaatccaagttcttgaagaaatctcttgagccatatcatctctttgccagcttcagtagccgcaatatactctgcttcagttgtagatagtgcgcacttctgcaacttcgactgctatgatatagctccccttgaaaaagtaaacaaatatccggtagtggattttctgttatcaaggtcacctgccatatcaaaatctgtataacctttcaaaattggatttgatcctccaaaacataagcattcacgagagcttcctcttagatacctgagtatccactttacaacttcccaatgctcttttcctggattttcgagaaatttgctaataacaccgactacatgagcaatatctggtcgattgcataccattgcatacatcaaacttccgacagcagaagaataaggaatcttggccattctctctttttcctccgttgttgtaggacacatcttcttactcaacttcaaatgaccaggaaggggtgtgcgaaccaacttagcacttttcatattgaagcgctccactacacgttctatgtacttctccggtgacaagtaaagctttctttcgtttctcgaacgagtaattctcatgcccaaaatctgcttagcatgacccaagtcttttattgcaaaagacttattcaactgtttcttcaactcgtcaatcttggatgcattcctgcccacaatcaacataccatccacatatagcaagaggatgataaaatcatcatcagaaaatctttgtacaaatacacagtaatctgaagaagtcttcttgtagccttgctcccccataacagactcaaacttcttgtaccactgtctgggagcttgcttcaatccatatagactcttcttaagtttgcatacaagattttctttaccttttgcattgaagccttcaggttgttccatataaatctcctcttctaagtcaccgtgaagaaaaacagtcttcacatccatctgctcaatctccaaatcaagattggcagttaaaccaagaactgtcggaatggaggacattttcacgataggagaaaatatttcgtcaaagtcaatacctttcctttgaccaaatcccttgacaaccaatctagctttgtatctgggcttcaaactatgttcttcagctttaactttgaacacccacttgttcttcaaagctctcatgcccttaggcaatttcaccaactcataagtatggttctcatgcagagatttcatctcatcttgcatggcttcaatccattgatccttgtgctcatcttctatggcctccgcataacattcaggttctcccccatcagtgagtaatacatattcattgggtgaataacgggaggaaggagtacgaggtctagaagacctcctgagtggaatatctaactcgtccacagcttcgtgagtaggagcatctacctcatcaacattagcattgttatcaccatcaccatcaatatgctgatccagaatatggttctgggcatcaccatcatcattgagcccaccaacgtcatccacatttgtatgaggaacttgatcaagattaactaaaccttcagaacttgaagattttagtttctccgctttgttaatatcttcaatggtttgatcctccacgaagataacatcacggcttctcacgaccttcttctcaattggatcatataacttgtaaccaaactcatcaaggtcataaccaatgaagatgcattgccttgtcttggcagttaattttgacctctcatctttaggcacatgtacaaaagctttgcaaccaaacactttcaagtggtcataggaaatatccttgccataccaaactttgtttggaacatcactttgcaaagcaaccacaggggaaagattaataacatgtgcggcggtcaacaaagcctcaccctaagaggaattcggcaactttgcttcagaaaacaaacatctgactctttccatcaaggtcctattcatcttttctgctaaactattaagctgaggagtcttaggaggagtcttctggtgtctgataccctgttgtttgcagtattcgtcaaacagtccacaatattcaccaccgttatcagtacgaatacacttcagcttctttccagtttctcttttagctgaagcctagaactgcttaaagacacccaacacttggtctttagtcttcaagatgtagacccaaagtttccttgagcaatcatcaataaaggtagcaaaataaagtgcaccacccaaagtccttgtcttcattggaccacatacgtctgaatgcaccaactcaagcaactcgtctttcttgaaagaagatgagactggaaagaaactcttttttgttttccagccaagaagtgctcacatttttctaattttgcactttcaaaatttgacaacaatttcttcttggctagaacatttagtcctttctcgctaatgtggctaaacctcttatgccataacgttgaagagttatggctctcaacggcattcaccatatcaacacaggtagaggtcgtagtccaatatagaccacgacgcttttccccacgagccataatcatggagcccttagtgagcttccactttctagcaccattggtactgacatatccctcatcatccaaaacaccaacagagatcaagtgcaaacgaacatcaggtgcgtgctttacattgtttaaaactagtttagttccaatactagtttccaaacaaatcattccaacaccagtcaccctagataagttccaaagtcaccctgagtataggatgagaaaatccttccttgatgtcacatgagatgcggcaccactatccacaacccagcttgactcatcacaagcaatatttatcaaatccgcatcaaggacaataacaagatcttctgtagtgacggtggccatacgattgccatcttctttctgttcttccttgtctctattctcctttttcaaaatccgcagaacttctttgtgtgccctttcttcccgcaatgataacacttaatatctttaagtctgcttctggatttgcttctattatgttctctattttgagaaccccgattcttgcttctccccctagagtcagtcaccaagacatctgatggggaggaaccttgagattttcttctcatctcttcatttaaaagactgcttttggcaagatccatagagatcacaccatccggagcagaatttgataatgaagttctaagaatttcccaagaacttggtagggaaccaagtagaaacaggccttgaatttcttcatcaaatttaatgctcatagcagataactggttcatgatcccctgaaaattattcagatgatctgtcatcgcagaaccatcatggtattttaaacccaacatctgctttatcagaaacatcttgttgtttccagttttccgagcatacaaactttcaaggtgctcccatagggtccgagcatgtgtctccccagaaatatggttcaaaacattatcgtcaactcactgtctaataaagccgcaaacctgcctgtgtaacagattccactcttcatctgatttattatcaggctttacagtggcgaagacaggttgatgaaaattcttgacatagagcaaatcttccattttgcccttccaaatggcataatttgtgccattcaaagtaaccattctactagtgttggctttcatcgtttatcacaaatacaaatactatttattatgagaccaaagtaattcttttctgatgtggaagttcagactgtgctgcaaccacagagcatactcannnnntatttattatgagaccaaagtaattcttttctgatgtggaagttcagactgtgctgcaaccacaaagcatactcaaacagaaccttggctctgataccacttgttgggaataaaccccgtaaaaataatattcacgatattagtgataaacgcggaacactaagttatggttaaatcagtaagaataaaaatgcagcaaaaatgacaccaagattttacgtggaaacccttctgaataagggaaaaactacggccaagaagagcaactgatatcactatagcaaggattttacactgtgtagtaacgagtacgaatactcctaagaccactacactctcaaaagaaataaacactcttttgctttttcacctcactacaatatctctcacactctatttttcttcacaaactattttcttatagtttatggaatatcttgctcttttttctctctttgttggtgtgtagaaatgagagttaaagctctccttttatagccaaaacctcactctctaaagcctacaatatttgacaatttgcacatccttttcacaatttcaacaaggttggctaccaaaccaaaccaagtcaataaaattggctaccaaatcataccaattagtaatggtgcacaaagtgattccaacgagaatttattgtttcattgaacctcaacttttagaagttggattaatgttggcattttcacaaagtgattccaactagaattggttgcttctttgaacctcaattttgaggagttgcattaatacggggattattgtatattggatgctgaaattagttatttcaactgcaatttgatttttattgtagagtaaattaataaatgtttgatattttcttgttttctgttaattgtgcgcctcacttctcgctattcactgcaagtctgtggaccttgttttattttgttgcacgttttggttttaagaacactaggtcactcctacctaggggtgtcaatggatattagaaaaccgacttaaccgaccgaaccgtaccgtaccgaaccgatttttaggtttcttttaaagaaaccgtaggtttttatataaatctataatcgtaccgataattagggtaggttttttattttataaaaataaaccgaaaaaataccgaaccgtaccgaataagttttacatatgaaaaatatattcatatagtaagtttaaaactagtaaagtattaaatttttcattgggtcttggaattatgaaaactgttacaagccaataagtaattaaactcaaaatactaattcctaaaacnnnnnnnnnnnnnnnnnnnnnnnnnnnnnnnnnnnnnnnnnnnnnnnnnnnnnnnnnnnnnnnnnnnnnnnnnnnnnnnnnnnnnnnnnnnnnnnnnnnnnnnnnnnnnnnnnnnnnnnnnnnnnnnnnnnnnnnnnnnnnnnnnnnnncttttatataatttagatttatctttttaaatatttaatatagactttattcttgagtcccaacttggttaatatctttccactcgtgtgatttatatcttctttgcttttacttggtttcttttcgttggtgtcgaatagttgtgtatttatactctagccatctttcatgttttttaattcattatcctttaaacagtaaaaatgtctagagagtttcgctaagtcctataaaagaacgtacgttattgcattctatttttactggtgaattttatatgacatttaaaaaataccgaaaattaaccgaaccgtaccgataccgaagtgaaaccgacatgattgggacggtttcgaaaagtctagttttggttatacataataaaataaccgaaaaattggtatggtataaattttataaaataagccgaaccgaaccattgacacccctactcctaccttaatgaacaacatttataacttatcgaatgtttccacaagacagagatcgtatttggcatagtaattttaatgtgatttcattcgtgataaatttttgattttccatatagggaagtctgctgcaattcagtatggtagtggagctatttctggattcttcagtcaagataacgtcaaagttggtgaccttgttgtaacagatcaggtgagtgaggctcctcacttgttttaagtgtcttgaaggtagaaatcttacatctcaaggtgttcatgtactaggaatttattgaggcaaccagagaacccagcgtgacatttttggtagccaagtttgacggtatattgggtcttggattccaggagatttcagttggaaatgctgttccagtgtggtacgtggacagcatttagtttgctctctttctttcccacaaaccaaattaaagatctagacaattcttttttccagatgaggtttaacacattgaaggattagatttccataaatgcaggataggctggatgtctctttctgtttaaatttgatttggcattcatctgggcagcatctcctgtcttttccaggtacaacatggtcaaacagggtcttatcaaggatcctgtcttctcgttttggctcaaccgaaatacagaggaagaacaaggcggagaaatcgtatttggtggggttgatcctaatcactataagggagaaataacttatgttccagtcacacagaaaggttattggcaggtttgtcattccgtcaattcgttactatgtatgttcatgttttgtacaaatgctatcttaatcttagtaatatgattggcagtttgatatgggtgatgttcttatcgatggtaaagctactggtatgttttgctctgtaccttttgaattggattgctgaattttgcgaatatagatgagggctatgtgcctggatatagtcttcctttgagtttttaacatgaacatatcgggtgtaggttactgtgaaagtgggtgctctgcaatagcggattcagggacttctctcttggctggtccaacggtattatctataaccttgattttggacatatcgcttttttgttatgtttttgttatttgtttccaccatcaaagtcaaccgcaattcgattattgatttccttgttcctttgaaccttcaacaggttgctcagcaagaaaagtaacattttcctaagattcatgagttaaatagaacgaatccagtgtctgatctgtgttgtgttttaatttttcatcacaaagaggatgttagtgaaattggtttttcatttctgaggttacctttggatataccatcttagcttatcactgggtcgatgtctgtaaatctgctttctctttcctgtctttcagcttaatatgtgtaaacctgcctcagtaggtacttgttgttttgtgttacttgcttttattacgcttcaatgaggatgatgcttttacttctgctttagtcctagtgttctgtcgacttatttatttacccctcttctatttgaaagaaaattatccaacccgaaaactgtagccaggttttatcctgttgacttggaaatgctgacaattaaatgaaataaaaatctgctgccttttgtctctacaaattcaggggcgaacgtttacccaaacggtgtcatccgacaccgcttggtcgaaattttttactgtatagacatatatatgtgggaaaaaacagtacgcaatataaattataaatgaccatttatgcgtgtagctgtctctggtataatggtcaagtgctgttttttccctacttgacttgatgtcgtgggattgacctcaacggatggcatttttttatttcaaattttttagcatggtccttttaaaaactagagtttatatagagttgaaccttcaatatcatcttaaaaaaacaactaaatctgggggacatgacggcttccacgttataagtgataaaaaatttatttgaatgcataaaggaagctgtttaagcatacataatataatttagaataataatttttaaaaaattattcgacaccgcttactaaaagttctgcgtacgcccttgtctacaattgtacgattaaaacacttccaaggttgagcaatcttaagcccacccttttccgtacaggccataatcactatgattaatcaagccattggagcctctggagttgctagccaacaatgcaaatctgtagtggagcagtacgggcagacgatcatggatttgctgttagcagaggtgagcattcaactgtgtaacagcattttcatttgtttgatatgcagtttcctgtgcagttacagcaaaatgacacttggcaatctagttgcctttcccggttatctaattggtccgcatttaaacaggcacatccaaagaagatttgttcacaggttggagtatgcacctttgatggaaaccgcggagttaggttagtcttcaggctctctctgccccttcacgtgaacatattgtgcattttgttaatccataatgttgatataaatactgaataattctgtggccttttttctgcagtatgggaattgacagtgttgtagacgagaaagctggcagatccacaggactgcaggatggtatgtgctctgcttgtgaaatggcggtcatatggatggcgaatcaactgagacaaaaccagactcaagatcgcatattaaactatgtgaatgaggtaaaacatctgtcactgcaattttctccttttctttgaaaagaatgctgactgactgacagctttgcgagcgtctcccaagcccattgggggaatcagctgttgactgtggaaagctttcttcaatgcctaaagtctctttcacaattggtggcaaagtgtttgatctctccccaaatgaggtatgctttataatggtgtttgcgagtaataaactttgctatgcctcttgtaattcaacattgtcagagagaaaaattaagtggctcatcatagagtctttttgtggcattacaactaattgtcatattacaaaaccgattctagtgtttaaggttttcagtttctacagagaagtagatgtttgttgtcatcaagaagtacttctatattttgaggttgtgagtatttcgattttacatcaatttagatgtctcattttccaactaagtaatctaagagaacctccgtaagatctttgtgccgtgaaaaagttactctttgctatttgtatggaagtgtattacatgctgaccttgctaatgcaagccgcttgagaaggcccaatgaatcgagatttagatgtcgtcccccccaccccccgggccccaaaaataataataatttatatctggatgattcagcatggaacaattctctaccttcatagacaggggtaaggtctgcgtacacactaccctcccacaccccacttgtggattccactgggttgttgttgttgttgttgattcagcatagaacaaatcttacaaagaagaaaattcatcaagtgtacaccaaatcaatttgatcattcacgttttttctaaatttgtttgttttgtggtttagtaaacataaagagattgagctttgaataattcaggatagatcacatcttataaaggaaaaaattcaagcgagacaccaaatcacttgaccatacgcaaaacttttctttaccagaccatcactctagtcttttcctgccctttcaacaaattttattcaagaatgagagtaaagttgtgatccgatatgtggttctgttttacttgtttcagttgtttgtttaacttgctgacctagattgatctatattctaattttggattcttttcccgtgatcagtacatactcaaggtgggcgagggtgctaaggcacaatgtattagtggtttcactggcttggacattcctcctccccgcggacctctctggtaaagttatctttatatgttctctctattttagtttataattatgtttttttgagataactatcagcaatgtagttaatccaacaataagcttaatccgaattatagagctacggcacaattaaacccgagccagcaattcttttgttcactgagttctctatggtattcctttggttacaggatcttgggtgatattttcatgggtcgatatcacacagttttcgattatggcaaactcagagttggatttgctgaagcagct

SEQ ID NO: 12 - DNA, 2807 bp, Nicotiana tabacum
atgacttttttcaggtcgttcttattctttcttctcaccttatttgttatttcatctgcactcgacatgtccatcattagttacgacgaacagcacggccagatggggacaacacatcatcgtactgacgatgaagtcagagaattgtacgaatcgtggcttgttaagcacggaaagaattacaatgccatcggagagaaagagagaagatttgagatttttaacgataatttaagattcatcgacgagcacaacgctgagaaccgctcatataaacttgggttgaatcgattctctgatcttaccaacgaggaataccgtgccatgttcgtaggtggacggttggatagaaagacgaggttgatgaagagccctaaaagtaaccgttacgcttttcaggccggcgaaaagttgccggaatccgttgattggagagagaaaggcgccgttgcccctgttaaagatcaaggccaatgcggtgagtttttttcttcttcaaaactttcctactataaaggaaagctctgctctttatcgtaaacatgtacttttgttttgtctgcttacggagtgagaccaagaggaagagtttggatagattgttgaaaggagtcatatgtaggtcaaaagtttttgatttttaggttgttttttgacctatgttgtcgtcttatacggtcaatgatctgttattgggtaactaatgattctgttttcatgtttatttcagtcaacaaattggagaataaattaattgctgctctgtctggtagttaatcttcatgatatacacctaaagcttacatcctgatttagtatttggtgtctccaattggaatgtttatttgctttgctagtgtttcctctctctctctctagggtaaatataaaaagatctaaaatttagaggtacctggtgtatatcttaatatattccatgtacaaactttaaaaaattatttaagcttcccctaatttgtttaatacgctgataaggggtaatcaaaaagcataaagattagattgaacggacacagtatatattttgcttttgcaagttgatcagtttctttctccattctaaatcggaatcgaccagaatttaaagcggtataacttaagattaagccatgaagacatatttggctattctaggtgttataaattttaacccaagtgtcctagggaattgatgtttaatcttgctttgattatgacgaaacccatatctcgattggttagatatcagtatatctatgttatgtatagaatcctcgtttgaaatttgagattttcttatgaagggagttgttgggcattctcaacggttggcgctgttgaaggaataaataaaattgtaacgggtgaattaattagtctgtcagagcaagagcttgttgattgtgataggagttataaccagggatgtaatggcggtctcatggattacgcctttgatttcatcaaaaataacggtggcattgacactgaagatgactacccttaccatgctcaagatggcacttgtgatccatacagggtaagtaattaaccatactatcaagaaaacatccaaatattaattatgtactatttcagaatgtaagtctatatagcaagtaattaatagtatttgctgacaaaatttggtcattcagaaaaatgcccgtgttgtctccattgaagggtatgaagatgttccagaaaacgatgagaagtcgttgatgaaggcagtggcaaatcaaccagttagtgttgctattgaaggtggtggcagagctttccagcactactcttcggtatggtgggcggatcttgactaatatatccttctgaatatatatgttatttgtgtctgaactcactggccctaaattctggattcgttattgcattttagtatgcctgtgtccctaatctgcaaacacggctgcattgtgccttgttttactacttaaagctagtatactcatttacccttccaatttttatcaaatcatgcagggtgttttcactggatattgtggaacgcaactagaccatggtgtagttgtagttggctatggaacagaaaatggcgaagattactggattgtgaggaattcatggggtgctaactggggagaaagtggttacatcaagcttcagcgcaatttcgctaattctacaactggaaagtgtggaattgcaatgcaggcatcttatcctcttaagtctggcgcaaatcctcctaatcctggtccatctcctcctactcctgtaacaccatcaactgtttgcgatgagtactatagctgcccacagggcactacttgctgctgcatttatcaatatggcgaatactgttttggctggggatgctgtccttatgagtctgctacctgttgtgatgataactacagctgctgtccccatgattatcctgtatgtgatgttgatgctggcacttgccttatggtaaatattttttccctcccattctgcttttttctcctttataataatgatcgtcaatttcacttattacgtgtaatattctaccagcacaggattaattagataactctgtctaccaaaactttggcagatatttaaaccttcgtcttcactcgtttattgaccgctagacccacgtacagattcaaccttttataggtttaatcatcaatgcaagactacttatcacaatcttttttctttttatgtgacagagcaaggacaatccattaaaagtaaaagcattgaagagaggtccagctagagtaaactggtcagggatgaaatctaacaggaaagtgagttacgtt

SEQ ID NO: 13 - DNA, 3695 bp, Nicotiana tabacum
tcatgaagaaacaatgatcaaataatagctaaaaagggaaaacagagccatcataagttggcaaatgtaggaattgaaatgtgctggtgcatggtttattgcaggtctagatgacggaacagatggaaacgaagtagcgggttcatttccacttccatttcccttggtggcctctggcaccacactggagggcgacggcgcttcagtagaattacgtttgttcactggcagagttgtcgatttgtcgttggattctctagaatcataacctgacaagaatggtttctagttaaaatatggacaggtgtgcacactaaaaaggtcatactcatgaatgcaaactcacaatcggatggtttccaacccaaaaccatcttctctcgatcaaaaaccacgcgatagcctgtcataaaattttctgcaaaaagatccatgtattagttttctgtcataaattccaaatacagagacaaaatcgaagtaaatcaacaaatagctcagatttttgactatgtaaccagttttactagttggttatggacttgattcttactaatttactttgtcacattcacatttccaataatatataagctagaagtatgtaaaaaacttgataggaaccaaaacttctaaaagttggtaattgtgagatcattagctggcatggtgcaagttatattgcaaaattccatggatagaaacaaaatctacgagcaagcaactgatagatacttacgtccaatgatgttgacatccccacttttcacaacagctaagcaaaatgcgcgagaaccatcctgatgatcatgactgggtattagaatattctaaaagagaacttctgtaataaagaaggagcagaaaccatcttacctggagcgagagcataattatcggatcgaaaagaaaaaactggttgccgcctttcattgtcaaatttaaatcaggaacttcgaatgtagtttgatttgcactgcgtatgtagcatgttaatcctgagagttcaaaggacatcaagaaagtaaaagtgatgaagattataaaagatggttcaccttagcccgtagcagtattcaaaaggaatttcgccatcaggttgaatacgtagctgttttgcttgagaatcaaactgaaaaaagaaacaaaatatcttcagtttcacaatacaaagaacaaactcccaactaacaaatcatacagtcagcctgtcactcacgttctctgtaatgactttgtaagctgggtcgttcaagtatgtgaatgaggtgccagagtcaaaaatggctgtgaaatcaacatcagtgatcttgtttcccactgttattcctgtcaagctgatgttataggttgggctgcaattcaaggaaggataagagtgaatacatatttggtcgaattctcctgaatcaagccaggaacagaggcaaacgctaaacctagaatatcaaattgactgcttactgtagttgatcaagattgagtggtgtttctccttggtctggactccctttatctccaaacactattcttccaataccatcagggccaaagcacatggagaaagaatttgcagcaagacctttacttgctaacatgctcggaacagatatactttccaagccaagtccaaatagaccattaggagcagcgccacttaaaaatgcaccggtttgtcttatcccacacctgaaattgaacaagtagaaaattaacatcatggtggataaagattgcatccaaattacactgcatttctctcaaaccatacccaccctagagcaattggagcctcaacacttttttgttgagcattatctgtctctaagtgcaagatgtcttccaccagtacccctgatgatgaggtattattggagagatatgcaactccataagcacatgcgttttgtgaagataagcatcgcctcctttgtccacacagagtgccgttgcaaggaacaatctgacccgttgacgacgtattagggctgtaaatattgagatttattcgctgtttcaaagcaaacaaaggattataagtgtcaaataatacataaagaaacattaaacggaaaaggcaaaagagcaaagaaaattttgttcctgaaggtgaaatcctgtggagtatgaagtaattgagctagtaagaatctcaaaattcttcaatgacaaacaagccacggaacaatatggatcagatatttcatttcagagtcagtatattacatgcatcaaactcactttgcaaatattgattatgttgaattttgcgctagttatgtatcttccttaacagaaaaacaattttctcaatacattctccaccccatatcttgttaactaagagaatatattattgtcataatgacggaaaaagacagttgaagagaaatccactgtgttacagattcagccattgtgttatcagcaggttcctttctgaaaaaggttatcagacgaggatgatcatcttccttgtagcagaaggcaacatacagacgaggatgatcatcgaaaaagaaaaactctttaaacatttgaaagtagaaagaaaaaggtactagaataaagcaaacatactcgtccagagcgtgtctcgagggcgcgcacacaattgctgcaatcacagggtagccaaaacaagtcactgccagtgtcaagtgccaccagaaatgatagcccaggagtgcccactgtcacatttgcataatgcaaactgcaaattggcaaagagtattagtcacacaccttaagaagaaaaaatcacaactacagatactacatattttgcattcaactctatctttataacatataaattacaacatgctactgcaaggaattttcagaacaattccttgtctagagaggagataagtggcagcagaggaacggaaaatcagaaaaaaaaaaatggaatttatttccggagcatggaattcgaactagaagaagactataattaaatttagagtcagtacttttaatataggagtgaaatcgccaaaattccagtccgatgaaacacacaaacagaattaaagaacagaaacaggcctaaatctttcttttttttgttttatcatattttcctccacatgaatctcgtaagaactattaatggtacatggaatttatttaagttaggtaacctatttttcctgaactgacacatccaactaaacagacaaaaacaaacgcaaagctcagtcaactctaacatcacactaaacggacaaaagtaaaagacagtaaacaagaatttccaaaaacgtactagtagttcacaatcaggaataacaacaaaaatattttaaaaaaaaaatagagcagcaaataaacaactgcaaaagcaatcagaaaagaaaaatagagtgagcttacaatcccaaagaactgaggcggaaagtttcatttcctccggaaaaagagagaggagtgggattagttgtatcagcaaggcggcgacctttgataaagcgatcacgctgagtccaagctgaataatactcaacacttcccttctcaggcaatccatgaaggtccaaaatacccttcaccggatccgaataccggtgatggatatcaaacccgaacgtcccaaacccatcgctgctctgcaattgcaatcccagaatcgccaagaaaataataggggcaaggaaaaaattaaaacttgtataagaattagccat

SEQ ID NO: 14 - DNA, 1644 bp, Nicotiana tabacum
atggtgacaaagtttagtatttttattttggtggtgttgttgaggttattttcatttggttctgtagcctcaagggaaattcacaattctggtcttaatctgaattctagtgcttctggtattgaattccctcaacatccaagtttcaactcagttactgcttctggaaattcagattgcagttatggaacatccaagaaatcaacaaccacccatgtaataactcaagaagaaaatagatctgatgaaaaagaagatgaagatttaatggtatctaaaaaccagccaagagaagcagtcaagtttcacctaaggcacagatcagctggtcaaaatatagaggccaaagactcaatatttgagtccacaacaagggacttaggtagaattcagacattgcatacaaggattgtagagaaaaagaatcagaactctatttcaaggcaaacaaaaaatagtgaaaaacctacacaatcttcttcatttgaattctcaggcaagctcatggcaacattagagtcaggtgtaagtcatggttcaggggagtatttcatggatgtttttgtcggtacacctcctaagcacttctctttgattcttgatactggtagtgatcttaattggattcagtctgttccttgttatgattgttttgaacaaaatggtcctcattatgatcctaaggattctatctctttcaaaaatataagctgccatgatcctaggtgtcaccttgtttcatctcctgaccctccacagccttgcaagtctgaaaaccagacttgcccttattactattggtacggagacagctcgaacacgactggtgatttcgcgcttgagacgtttacggttaatctcacaacccctagtggggattcagagatcaagaaggtggaaaatgtgatgtttggttgtggacattggaatagaggcttgtttcatggtgctgctggtttgttaggacttggtagaggaccgctttcgttttcgtctcagcttcaatctttatatggccattctttttcgtattgtttggttaataggaacagcaattctagcgtaagcagcaaattgatttttggtgaagataaggaactcttgaaacacgcgaatttgaacttcacttcactggttggtgggaaagaaaatcatttggaaacattctactatgtgcagataaaatcagttatagctggaggtgaagtgctgaatatacctgaggagacatggaatttgtctacagaaggtgttggtggaacaatcattgattcaggaactactttgagctattttgcagaaccagcatatgagattataaaacaggcatttgttaacaaggtgaagcactatcctgttttagaagattttccaattttgaaaccatgttacaatgtttctggagtggagaaacttgaattgccttcatttgggatagtttttggtgatggagctatatggaattttccagtagagaactacttcatcaaacttgaaccagaggatattgtttgtttggcaatgttaggaactcctcattcggccatgtcgataattggcaactaccaacagcagaattttcatatcttatatgacaccaaaaggtcaaggctgggatttgcaccaacaagatgtgctgatgcc

SEQ ID NO: 15 - DNA, 2854 bp, Nicotiana tabacum
tcacataggagcaagatgaccttctttagacaatttatcttgcatccacctctgaagcatttccattgctgccttaggctgatccattggaaccatgtgacctgcatcatggaccttaaggaaagttaaaggtccatagtttttttgaactcctttctctacaccatctactgcaaaagaaacttgtgtggcttttccaaaggctttttgccctgtccatttcattgcatgcacccatctcgaattccctgtccatataacaagaaatagagttttataatattattgttagttggtagctttgaattgacttataaacaatatgatagagttcaacttctatattttgacagacgtaaaagataacttgaagtaacttttgttaaaagtagaattactagcatgaaaaaataaggtaggttaaaatacactaatatagtatgaaaatcctcttttgtgtatataagttaaatccatatgataatataaagcttaccaagccaattgcagataaggtcatattccccagcatacactagtagcttgataccatcctcaaggagtgaaggaattcccaattcaagattcctcatccagtccaactgcattgcctggtaaacttcagagctacatgaaacaaactcaatatccccaacaccaagagcctttttaacttgttgatcattgaggaaagtttccattttggagaaatcatagcatagatcgccctcacatctcttccgcacatcatagtactgcaactcggaaattacaaaattcatatgactttaacttttgtatactgacagtgtaaaaaaaactttattctatcacgtcacttaaaggattgtaactatagatacccgttcattataagtgagatcagtaatttggaaaataagacaagtaatatgttgtacatcattagctcagagaaaatgagattggtctttcttacgtttttgtcaccagcaatgtccataatcttgttgaagatgcttgtacaaacaagatatgcagccatgcaagcagttccgccatcttttcctaatattatttgcatagaagaaagctaatgtaaagactagctgctgctatatgaagaaggaaaaggacattgaggataaacaaaatgaattaccacaaagcttaattgctagttgacattttggatatgacttctctatggcattgtaatcagattttttgatcaatttcatatccagagcatagtcagtgtaggctttgtattgaatttctggatcagtgagtccattaccaatagcaaatccctaaaaaaaattgtactttgttaagtcattggcatgacgacaaattcaaattaaacctaactaaaggtaattactggataaagaaaaagggatgatatatggtaagagttagaaataccttgagatttacgtagattccttctttatttttgtttccttggtgaacccgagaagcaaatgcaggaatgtaatgcccagcatatgattctccagtaatatagaaatcattttttgcatactgtggatgtgccttgaagaaggcctatcatcaaaagaatttgaaaaagtttgaattaaattttattaattatatcagttaaactttagagatttatcacgagctaaaaaaaaggaatgaaagaataggatcaacctgcaagaagtcatagagatcattgcttacgcccctttcatcgtgacgaatatcatcatcgtttgaactataactgaaaccagttccagttggctgatcgacgtatataagatttgagacctgtaaaattgcaatttatcatatgttatcattcttcaactaacaaaggaaagttgcatgtttgattataggatttaaccggtgtaaacgatttttacactattgttatattttaacatgttgtaacatgttgtattcgtcccacttaaataaagtgaagagaagcgtagtagtcattgatgtcaataaacgttgaactactttcgaatttttgaaattctacaagtcacagctaatgaacaacaagtgttaaagaaaaaaatgctagtaggtaaaaaggtattttgcatgatggagaaaggttgaataacaaataaaaacatggagggaattcttttagatttttaccatattcaaaagatctaactgacgtttcttgagaaattaattgggtaaaataaaaagaataaactgaaaaaaagagaggaaaaaacaaaagaaaaagcaaaaggaagaaaacaagaaccttgtcccagccgaaatcattccagacaagagacatgttatctgcaattttgaatggtccattttcataaaacacagccaattcactgctacatcctggccctccagttagccatataactactggatcattcttcctgctcctcgattcaaagaaaaagtaaaacatcctgccaaaaacagataatttagcattaattaataatacccataaattcatttttttaccaaaatgaagcaagaagaacatttaatccaattcaaaccttgcatctttagtatgtggaagacgataataaccagcgtgatgacccaagtcttgaactgtagacccagaattaccaacataagataaattcaatttcttttcaaaaagtctctgttcagtaactgctgcagaatcccctgttgctgcagccttgttgatatcatgcttagggaataaattaagctgtctgattagcttttctgccattgttaatgggaattttggagtagaagataggaaaaaatcatcatcattagaatttaaagttgatgagaaagataaggaaatagaagcaagaagcagagtaagaaagagaagagagaaagatgaaggcat

SEQ ID NO: 16 - DNA, 2125 bp, Nicotiana tabacum
tcacacgacactttggggtgggatatcctggttcacaacccgggtgtgaaatccctcattatcaaagtaagggtcacactgccagaaaaaacaactttattagtggttgatcaaaaagatccacagtagctaatggttttagtggaagctgtaacctctgtgaggtgaaaataagtcagcatttacctcttctgtgaccacacccctacggataaagtatcgccatgctgatataggatatccaccatcacaaccactcccacgtaaaaagccacagcatgctaacagatcatttacggacagagagatattctgcaatacacattaaaagtttagcatcagtgaccataactacagaaatacttcacaaacattttgtgctaattaagataagatggtttccatgtgcttggcccatgaaaaagaatcagggctcgcacgtgagagagcatgctgaagatatataaataactaaataaaaatgtgtcatctaaagcttttaaatgaggcggtcacacagtgcaacagaatttaccaagttatgatggatacagaaacgatcagacagagattcaacagcaccaaaagcccaacaagaaccgcaatgtccctgatctgtgatgcaaatttgtcccggtgattgatgtgcaaagatggaaagcattaggatcactaaaatagaattataattcagtagtagtaagcaagaacaagaagaaactgacctagaattcttccgatagtgctacattgaggccaagcttttcgtgcatcaaactcttttggtagctccaaaagctttggatgagttagaatcggaattccctccaaatcaccttctcttgcgggcttaactccaagaaggcgcttaaattgtgaaacctgtgaataccaaagatggagataattataaaagcatattttcattgtatagctgcaaaataagcaactgttattgatggttcgagaaagcgctaaactatatgatgatatgacgacaagagggggttgctccgatggtcagcatcctccacctacgaccccaggattgtgggttcgagtcaccaaaggagcaatagctccaacaaagaggatcacaggggaatcaaaaggggaggggaattttaaaaaaatgatgatctgaccgtgaaattcgagaatcgagggttgaatgcagctttccatccagctttggcattttcattaacctctttgatgattgattcctgcatgatcatccaaaaaagctctctcagttttcgaattgaaggacaagggctataacatcttgaatcatgaaaagaagaataatgtacctgaaggattgcagattcaactttagcttcagatattggcttctctgcaacaacctgctttccataagaacacatcaattctattcatcaatagacaagctaaaagcttttaggaaacagagttgcaattccaggaacaaaagtatgacagtactgtgacaaacaaagaactaaaggtttcactttaatcaagatgaaacgcttccaacatttcttattttcgacattataatcctcttaacttaggaaaattaataaaaaatttgtagcaaatgcatcatatgtctaaagcactataacatagaggaagaaccatagaacaagcataaattgtaactattccattatttgtcctcctttttctcccctttctgtatttctttgtgaagcaatacttcctctcatgttatatatagaaacatgtaagttagctaacacataagtaatttgcatcaaaccatatatttaacttcagaaacatgtctatacttctgttttctcattctcactaggtaataagaaaatcattaaaatttatttctactcatgatttcaagtcaacgcttaactaaagcataaaaagtccaaaatacccaacaatatttgatctttctgaagaaatacaaaaagggtaatccatgtaatcatcaaaacctatataaattaaaccaataatctaaatccatctaaacaaagaaatactcttactgtagaaaggttcaacgaatgaagaaacaaacctgcaatataaggatacaaaaagcacccaaaaacaaaggagctgctaaagacttcagagtcaaggtcat

SEQ ID NO: 17 - DNA, 1659 bp, Nicotiana tabacum
atgttccgactagtaatggtgacaaagtttagtatttttattttggtggtgttgttgaggttattttcatttggttttgtagcctcaagagaaattcacaattttggtattaatctgaattttagtgcttctggtattgaattccctcaacatccaagcttcaactctgttactgcttctggaaattcagattgcagttatggaacatccaagaaatcaacaaccacccatgtaataactcaagaagaaaataattctgatgaaaaagaagatgaagatttaatggtatctgaaaaccagccaagagaagcagtcaagtttcacttaaggcacagatcagctggtcaaaatatagaggccaaagactcaatatttgagtccacaacaagggacttgggtagaattcagacattgcatacaaggattgtagagaaaaagaatcagaactttatttcaaggcaaacaaaaaatagtgaaaaaactacacaatcttcttcatttgaattctcaggtaagctcatggcaacattagagtcaggtgtgagtcatggttcaggggagtatttcatggatgtttttgttggtacacctcctaaacacttctctttgattcttgatactggtagtgatcttaattggattcaatctgttccttgttatgattgttttgaacaaaatggtcctcattatgatcctaaggattctatctctttcaagaatataagttgcgatgatccgaggtgtcaccttgtttcatctcctgaccctccacagccttgcaagtctgaaaaccagacttgcccttattactattggtatggagacagctcgaacacgactggtgatttcgcgcttgagacgttcacggttaatctcacaacccctaatggggattcagagatcaagaaagtggaaaatgtgatgtttggttgtggacattggaatagaggcttatttcatggtgctgctggtttgttaggacttggtagaggacctctttcgttttcgtctcagcttcaatctttatatggccattccttttcgtattgtttggttaataggaacagcaattctagtgtaagcagcaagttgatttttggtgaagataaggaactcttgaaacacctgaatttgaatttcacttcattggttggtgggaaagaaaatcatttggaaacattctattatgtgcagataaaatcagttatagttggaggtgaagtgctgaatatacctgaggagacatggaatttgtctacagaaggtgttggtggaacgatcatcgattcaggaaccactttgagctattttgcagaaccagcatatgagattataaaacaggcatttgttaacaaggtgaagcgctatcctattttagatgattttccaattttgaaaccatgttacaatgtttctggagtggagaaacttgaattgccttcatttgggatagtttttggtgatggagctatatggacttttccagtagagaactacttcatcaaacttgaaccagaggacattgtttgtttggcaattttaggaactcctcattcggccatgtcgataattggcaactaccaacagcagaattttcatatcttatatgacaccaaaaggtcaaggctgggatttgcaccaagaagatgtgctgatgcc

SEQ ID NO: 18 - DNA, 3809 bp, Nicotiana tabacum
ttacaaaggttgctgagctatccatcttttaaacatatgaaagctctcttcacgtttgtactcaggagctgtgtgccctcctccctaaagagaaaaaaagacaagaaggaagaacaaaaacatctgagaactgtgaaaatgtgagcacaagacaattttactatcgagtgtgagtacaaaattctaacctttactgttgcatatgtcatatgattagagaaagatcttgtgtaactgcacatcaaagctataaatttagaatttcataacaattatatcgtctatccaactggaatagagatccagagaaattaaaatggagaatcataccctgcaacttgaccatcaattgtccaagggcgccaatcatcaatgatagaataatttagatactttatccatgcttgcgtcgattggaaaggaacaaccatgtcatgatcaccactgggcaaaaaaaaaaaaaaaaaaaaaaaactttgttatgtatataataacttcagctaaatcttttttgcataaagcacaaattagagaactacaaacattggtttaggtttaaagtatcaaacctgtatatgagtgatcgataacctttggaactaaggttaacatggtaaggtatactattcatgaaagtaactctataagttgtacccataatactttgcctacatctcgcccacgctcttcttatagttccctaatcaaagaagaaccaaaaagaaaagaaaaaaagccttttaatatcttgcaccttaatgccaagcaaccttcactatgtacaagtacaaacaattgaaatacctttctaacatggagagcctcttgaacactagggtcatttgcccaatgattggagagcttgcgtgtcgcaacctaaaatcagaaagcatatgtatatctaagtatcctacatttatctgtttatcccgagaaatcatgaaaaagaaccgggcatatatgcctcttttaacataaataggtatatatcttaaaattattaaacaatattcaaactttattcggtgtaaaggcatttagttgctgcaatattcaaactttatatagtaatatttgagggacttacacgactttctcgacaaatgaagtcatcatgttttagaaagataaaatcctcttcaagagatctcctttcaccagacaattggcgtgggtttggcgattctgagtccgttccacaaaaaggctctagtatttgctgatcatttatactgcttacaagctacaaagttgcattacatgaacattgtggtattacctaattacaaacttagtaccaattcaaaacattaaaacaagaatatgtaagaaggaatataaccttaccttcttgaacattttaaagttttctaaacatagtttattggtaggatcaatgtttcggcaatcgcctttgcaagtctccttcagtgactgatacaacaagatccaaattatcatttttgtgccaaactgtgttggtatgatacaaagttaatatatgaattgaagtaagagatgaaccaacctcataaagttcattagatattagtcccataccatgacagaaaggaatttggtaattgctttcttcaggaaatgttagcggattgccaagtgaataaccctgaaaggatattaattaccattaaaaataataatttttcatgtatgagatatattttaaataaaaggaaaggaatagaaaaccttaaggttgattagtggctttttgcctgcttcaattcctgcattttcatatcactcttgaagtgtcaacagagaacactttggctagaaatgttttgagaatcttctcttcaaccaagtgaggctacacattcagttttgaagagacaacaaaagaatgtagtgttctatatatcttatctaatatctgtggaagtaatgatcaataataacaaagcataaacttggcttagagccctaggaatggagaacctttgatcaatagagtcactttactccccctagtggaccaattcagcattaattgccagcgggcttcaaataacgaatggctaaaccggaaaaataataataacaaagcatacactaaagagtgatggggtgatgagaacgatcacaaccgcacattatatgaaaatactaaatgacacttaccatctgatattagttgaacaataactggaactgtaatgcctgaatatgagtccccagaaacatagaaagggttggaaatgaattctggatgattattgaaccactgcaaaataaatcacaacttatttcgcgatacatttttgttatatttggttgctatttaattattactgtcttcatttcttcacggttcatttgatcaatccaccaagatacacatatattaggatttaggtgggtggagggaattcaaatacgtatatattgagcctaaaaaatttatatcctagatcctctaccaatgaacaatgcaaaatgagaagtatattgaggaatacatgaaaattcagagttaactctgcttactaattcaatctaaaaaatactcagtttactaattcatatgtatctaactaaatgaacttgaaatgattttcaaatacctttagtagaaattcatagacctggtcgcacgcttgtagatcagtacacttggatgccgctgaagttgttgcatatgagaacccagtatttacaggctgttccaagaaaagtatgctcgcaaactaccaagtttaaggaacacattaatttgatgatctaatgttaaccataagaggataaaagagaacatgaagtgtggattagaatatatatgcagtttgttgacagcaaaatgaagtgtgcaatagaaaaataacatgctcttcagtgttacctttgtccaggaatatggagttgaaacaagaattggtaggctcccattgtatgccttctgaccaaaagccaatggccctacaaaagagaattcagaagttaattttctccaactatgagttacacgtaataccaagcttttccacacctatatatttactactaattgactaattagaaacatcgactaaaagtaaattgcttttgtgatactaacaaaagcatttctcaaatgagttaagttaatcacaaaaggttaaactctatttgacaaaaattacatttgaacacaaacaataatggtaactgttgggataaagataacctccagactatgattacatatttaaggtgagttactgataaacatacttgataatacaatagtagtataactaacatactatcataggttaaataatattttataaaaaatatttacattgtcagtatatacaatataaatatttacctacttcatacgccacacccgtgaaggatgagcaaccaggccctcccgttagccatagcaagagtggatcttttttagggttggattctgatttgacaaagtaatagaatagttgcacttcctcggatttgccaactccaatatatctaacaattgtattcaaaatacatcacttcaacaaacttgttttactactccactatatatgtagccagtatgttctgaatgaagtaaattacctaagaaaaagtttagattctttttatactaattgatcttttgatcaaatacaagttaaaattcaaagggtggtaaaattaacgtacccagtctcaagataaaaaggaagagggccatcaaaaccaggaagaaactcaacagttgagctattctgaggaagactttgtacatattgtagaaagagagtaagaggaagaagaagatgaaacaatagtggcaggcgaaaaccagacat

SEQ ID NO: 19 - DNA, 741 bp, Nicotiana tabacum
ttaaccagctagaggattcatcacactgccaatgaataacaccgcaccagtagattcgtctcttataaggaataggaatggatggtccgcaacaaaatccatttccttctcaataatcaaggacatggtcattattacagtagcggtaacagctgcagcttcggttccttcctcatttacctcaatgaaagacttgtgaaaaacctgtgaaacagacaggttctgaggcataggagaatcaaccatctcagtgaggctaccaccacaaaaaggcaacgtgaggccgagtccctttagaatgttggaagcttcaaatccaaaagttattttaaatttagggataagaaacttgcgcgctctaacttttccatatggaacatggttatttaaaaatcctggttctaagctgattttttccagtaaagcaggtaatccatcatgggcatctgggagaatgaaatacatacagaagcgacgcgtatccgtgccttgtttataaggaagcctcaatattttaaagcaatcaaacgctgctatgtactgcttcttcttgctagtcataaatggtgcttgaatagaccctccattgaggagatggaagtcatgatctttcgtttctgacacatcgaacttctcattccattctcctttgaaatatagtgcattggacaagatcagccttgtcatgttgttcactgcatcgcgaggaagaatctctttgataagaccatttgtctccat

SEQ ID NO: 20 - DNA, 5202 bp, Nicotiana tabacum
ttagaaaaaaagccaatgcttctttctgcgcactctagctggaacctctgtggcacattatgttcaaagtaaagcaaaaattagtattcaagaatagctatgacaaaaaattctgaactcagaaatagttaaagcaagaagacacttacctccaatttcgtataacgaattgtagtgaacttcgctccagaaactcagccacaattctgaaaatcaagaataacaagtcaaaagttttgtcttcaagagattaaacatatcgagaagaaatgttcgtcagcgccacaccaacacatttccgaacaagtgatttggaatttatttacttgttaagataagagttaatctgatcaggtttactcagtctttcctaagatcaccatggatgtgtttgtttatgaaaatataatcagcagaacatcatcaaacatgttaaaggggagctttggagcaacggtaaagttgtctccatgtgacctataggtcacgggttcgagccgtgaaagcggccactaatgttcgcattaggatagactggctacatcacactccttgggatacatcccttcctcggaccctgcatgaacacgggatgccttatgcaccgggctgcctttttttaatcattaaacatgttcagcatattcaatttcttgagaaaacaattttagcataacaaaagagaactattaaaacaggagcgacgatctgatgttactttattggcagcggatcaagtttatcgtctgtaacaaataacgcttaataagtgcttgcatcagtaaattgtgtgtttcacgtgaagcaagactctggagataaattctcctgatagcaactaatactgctcttagtaagagcatcaggaaactctgtacaaagcttacattcactaattgtaaacatacaaatgatccacagttcacaaatgacagcgaaggattcttgtcattagaatcagcctcgttcaatgatgcaacaatgtcattacaaattaaaggtgttttagttttactatttaaaaattagttagtaccaattcacttcgacatacttccactcacaatctattgtgtgtggtaccaagcaatacgatgatactttctcctaaatgagaaaagcacatccatttgtcaaaataaacaaaatgattcatttttgttttccttttttttcatttttgttttcctttttttttcatttttgttttatatatgtattcttataataaagtgggagcatgctagagagttcaaagtaggaccatgctacaaagttcagaagaatacttttggtttagtgtctcaaacaaaaccagcaagtactattatttaaattctggaatttatatcataatatcattattttagagttatttgtaaatttcaagtatttattttattttttgagtttaaaaactcaagcaggaagttaaagaactaataatcagaagtattgattgtgccatgatcattagatacaaataacataaaatgtatgtacccctagaaggttgtatgtccttgggaagaatatcaatgtagccgttgtctcggaaagacgtgaccaaacatatttttaccccaaactgcaaacaaaatacaagcaaacacaagtaccatcagtcacccaaaacgggaaagcaaaaaaataaaaatgcagagggcataagggcgaaaggctgattaacaacacaaatatctaaagcagttccacaaaggtaaaagagcaagagaatggtcatattgcgggaaattctttaggtagtagatctcctgcttttaagttgctttcgcgtttgatgctatgttgaacttcaaatatattcaagtttgaacccataatttctaaagtgtagcaaatttagtggtaagaacctaaaagctgaacccaccaaacttaaatcctgaatccgccttcgtatttgatgtcttagacatttgtatgccttctaagcgtaaatgtaggttgacaagatgaaacagggcaaatttaactttttttctcatttctgctctaatatctacagttaaatttcagtaacctacatgcaacacaggcatactgcacaaaaagtcaggctaaaaaataagaagatgccggcgtttgtaagaaagtaagaggattattagaaatgttcttggttattttctccgacagccttgggcaagaataaagctctaaatttcaccgtcaaagagttctaatcaggaaccattttaatacattgaggggttttctcttaaggaaaaataattttcataaaagccaaatggttaaaggttaacagctgagccgaattgccttaatactcataactcttaatgctaccatattatataccaacaccaactcaaaaattcacttcctaaaatttttcaactttttcacaggaaactattccactatgtgtattatgcaatgttagatactattaacaaagttgcttcattgttttttttctcatttaaaaagcttaaatttgcaatgcaacagttccactatccaggcaatacacctttattgacagtataatttgttggcttttcttgttcgtagtgttcaaatgctgtcttacatactaacaagtgtaccgtatatatgcctcaaaagctagttgaggacaaaagagaaactttcaacttactctatcggcagcggcttgtagagtgacatgatctccccactctcccaacctggttagagcaagaatatgttggtaatatattgagatttcccgcaataagaagcactgaaaattgaccagacagcttacctcttcattttcctcaagtagcttttgtatctcatgggcacataaccttcatataactttctaaagcgctttagctgaaatggattgccaactaggataagaaacgtgtaggacataaactagacataggcgtcaaactcaagcaagtataggactctgttgatgtttaatagatccagaaattaggttaagcagttgagctgatgagtctcaagcaaacaccgggatattttatttttagtactctattattatgcacaagttactttagttctactaaaactcacgaaaacgaatataaactgcaggatttgttaatctaggatgaacacaatcctcaaacataatcattatgtaatctcaacttttcacccatcctgtttcacaaccaaaggcaagagatgagaagcaaatattgaaaaaatgcaaacagacctgtttaacgacctccttccttacatgcttatgatactctggattatgatacaactgatccgaaagggcccgaaactacaataagccaagtagacagtcatatagcaggattaatcacctgtgaattaataagtagcaggtgggtctcaagttcaatgagagtttgtcgactagtcaaaagagaccgacctggcaatttccatctccttcaatttgcatttcagcaagaccatatgtcgctaacctgaaacaaagaagttacaaataggatccgagttgccaaaaggcgaaaaacatagaaaagcaccaagaaatttcaccctttaagtgctaagtgcaattaaagcatgaattaagctatatagaaagacactaatgaagaaaaagataacctatgagcagaaactataataatttggacaaagaattgaaaaactaaaattaatcaataaatatgaagtaaaaatcatgtcaattaagttccataatactggattcacaaaataagtcaaccaatgacctcaagctgaacaactatagcatgctcagtagtcagtacaatgatggataacctgctagagagcctcccatggtctagtgtggcatcatttgggtcaggtatctccccaattacccgtggagtgtgctgcaaggataataagactataagtagcatgtagagatagtgcaacatgggttttcatgggttaaagctcaaaaaggaatatatagagaagcaacctttggatacatacatgtggtcacattatactcatttaatttgaaagagttgcccccaaaaatgtaaatttagataattgttcataaaaaggtcaaaagttccccggatttctaaacttcttgaacattctccttcttcctctatggatagggtgacgtgacgcgcaatggatcagttagaaaggagaagaaactgatcaagtgtccccttcgcaacaacctttttccctttctcgcatccttggtcaagcttgagattttcttctatctggatttagttacccgaacctatgcaaagcaagcctacactctagctggggccaagccatctttgcctaagttccattacctcattaactcgataaagctggcattaagagaagcttggtagcataaagtgtcaaggaggtggttttcgcctatctataaggacagttggagttgatggtcctggttttgttacagtaagggatgttgcaggaatcacttgcattgatggaacagaagctcttcctgctcttgtattcgacgaagaataggcccaagggacatcaatggacaatcgccaagcacatggtttagctaattcaatagccttcggagaaaagtgataagtaccatcgaacaagcaaatcacttctggattattaacctttaaggatccacttatggtgaaattttggaatgatgcggggataacccaagggagtcagctaaacagagacggaaaatatcagtaccattctggtcggcgtatgcttgttgaagagaacaagctcacttctagctagctaaagggaaagagagatactatagaatacctaagtcaatttatcattgagctgcaaagatcatagcagacactacgaattaatagcaaatctcggcacaaacctctacatgtcaagatagtgagtccatcagatcacaaaagacttaataccagatacctttctagataaaggggtaaaatcactttctttcttccacaagatctccatttaaagagactatcaactgtacttaaatgtaatcatatcaactgtacttaaatgtaatcataccgggattgagtccaaatgagaaagtctcctcccaagtttattgccaccatatttgagagcattttcttcttcttcagctaaaattcttgcaatggtatgatcatcctcagtaccgtgtgaactactattcaaactagatgtagtagaactcgagcttgctcttgaatttccataggattcattcat

SEQ ID NO: 21 - DNA, 3551 bp, Nicotiana tabacum
ctagaaagggtaaatgagacctccgaacttcccagaaaatgcttccttctgaggctgttgcactatagttgcattgctcattcgctgcatttaaaacaaattaactgtgaaaactacagtagcaaaaggttaaagaaaacgaacatgaatagcacgtcaagagaaattggctttgctttaacggttatttcatctctgtcaacaatgaaatggcaatgagtgaaccttttcagaataagttggcttatctcattaatgagagacagataacaagagatgtctcctctaatctctaaattgatatttcatgttgtatggatcctaataggatgagaaatgcatcaaatacagaaaggaatggcagaagtggagatataccttgaggcagaggttccgacttgtgtcacaaataggataatcatgtgggcaacagtggcgtccatctttgcaacacactgcagaatccaacccacaacatttccaagaaacgcaaactccaagaagcctccacccacagcagcaggtttcaccttgaccacatgaggtaaacatactgcatttgcttggaccaggagatggaggagatggtggatttgggctactcttagttggatatgaagctagcttattgatcccacatatcccttcttgattcccactattacgctgcatgtgcatataaccatttattccccagcttgttccccatgaattttttataatccagtaatcaactccattttcagaaccatagcccacaatcagtaccgcatgatcaagtactgtagaacacggtccagtgaatatcccctgcaacacaaagatagcacctttatatttctctccgacaaacaatttaactgattaggagattggtaatttggagatggaagatacctttgaatatgattgaaatgctctctcactgccgcatatcccaacactcacgggttgatttgccaccgcctttagaagcttgtcctcatcatattggggaacatcagtatatccatcaatggttacaacacgtctttgtagctgcaaagtcgacaagttaagccaagcaatcatatgttaacgttgttcattatgttttatctggaataaacttgtcctaggttctctatattaattatgaaatccagaagcaggagggcatatataggacaaaaaaagatttagtacaagaataggagcaagaagatgagagaacaattatgtaccttgtttttgttgcatgttccttctctttcattaaaggggtaatcctcttcagtgtcaataccaccattctttttgacaaattcaaaagcatagtccatcaatccacctccacagccgtcattgtaacttttgtcgcaatcaattaactcctgctcagagagacttacaagagatccagtgacaatcttattgataccttcgattgctccagtggctgagaatgaccagcaagcacctgggaaaatgaaacagaagtaactggttttagttacagaagctagttgctgagattaagtatatggaatgacaatagaatgacagtgttgtggacaagggcaaatttgattcatattatctcagaacaaattcacaaaaaggctagatcttcacttccgtcctatattcaggctgacattaccagacatatctacagaaaataattacttgagaaacataaaggcagtgataaattttaagaataaactatacttagtgagaattgtgtgcagtcataaaagtaacaagtctaagtccctgaagcaaattctgcattgggaggaaagtatatttccgcgtatatgacagccaaattagttgctataaaacatcacactagtatgtgactcaatattgacagtaaaattataaaacatgttccttcgattgcacaagcaagtagagaatcatagggtacaattgtgtacacagttccaaaaacaagaaagaagagctaaaacaatgaattgtgagtcaatgattcaatggtcgaaaacaggaccaagaaatggatcagtggatatttatatttatttctatttttaaaacttaaagggcatgatgtgaagactgaagctggtaatccagttttgattgtgatgcacatgaatggatgtggaaagtaatattctctggaagacagaagaccactaaccacctcagttgctcagaccaagatagtgagtagatctcccctaatctattcaacaaagttcattggaaagaaacaaacaatgaaatggcggatctccgagcagtctggtgaagtttatggtccagtggttaaaaagaatgacaactcaaccatattttactcctccgatgtgctccgttcatgatctttttaatatttctcgctaatccgctaatcaataaagaatgagatactgtatcagtatgtcctattattgttgtcttccagtcactctgaagaaatgattttcacatacatagagacaaaaattgaaagtaagaaacaacaacaacaaaccagtggaatcacataagtggggtccgggagtataatgtgtacgcagaccttagaggttgtttctgatagaccctcggctcaagaacagtgagaaaattgaaagtaagaaacaaacagtatattcattcctaatcaactcatgaaaggacgagctcatgagactaagtttcaacaacaacaaccatatgattgtttattccacttcatcttgattccaatacctaataatttgtcttttggggcaactcaagggttcctaaagctaagaattctctaaatctcacacttctccttatacaaacattcaaatcctaaccaaactgaaagtgctcctgtctaatactgatgaactaaagtaagtgctgaggctaggtttcaatgaagtaaattagtcctgaacttcaacctgtcaaataatacaaggaaaagcaaaaaagggtagctcccagacaagagaaaaaggcaaaactaacatcacaagtttccattgtcatttgagaaaaaaatcatcaaaatccaaactttgtaaaaatttctaatgttggctctactatgcacaagttatatatcctccacataaatgaaatcactataaagatacaactaaaagataacgcaataaactgagcataccacaactgccttgattcttgactttagtaacagctcctttctctctccaatccaaagaagaaggaatatcaacaacaccaacatcattaaaaactccagcagaagacgacccagttttcaatctaataaaatcattagcagaagaggacaaacccaaaaaagagttcttgaattcatggtgagtgagatcagaaaaggcattgagattaagggtataagtggaattccccttactattatgctctataatataagcataattttcttcaaacacctcgagtctgtacaccctttcttgttcagaagaatatgtctttccattttgctgacaccaactttcaaaaagatcagaaattgatgaacaagtgcaaattggtccttgaaaaattagaagtacaagaaccaaagatggacataaccaactcat

SEQ ID NO: 22 - DNA, 4947 bp, Nicotiana tabacum
  misc_feature (477)..(477): n is a, c, g, or t
ttaatgcttattccagaaactccacttcttcttcttcttcttaaagtcaaatggcaggaagtctggaatggagcatcaaactacagtattagaataatatgataagggtagtgtgtacgccggtggcggacccaggattttgtgcaagcgggttcaatcttagaagtatataactttagttgtaaaatagtagttgtcaagtgggttcaaataaaatatttaaacaaaatttacgcagctttaatcctaatttatacatatatacagtattagtttttgatgcttgccaccacgtgcgtccaccactgtgtacacataccccttaccccctaccttgtgaggatagaaatctaaatgaagcaagagcagcaaacttccggtcaactctcaatgttcatcgctttgtccataagcatgtgataaacaaaaagtgttattccgtaatgcccatggtaaccccccccccccggggggggnggtttaaacatgtaattaatcagatataggccaattaataatagttgagcgaccatgctaaaaccacggaactccggagtacctaaccccccccccccgggggggggatgtccatgctaagacaaactaaacagaaacgggacataaaagtacaagcaactacctccttgaggatagattgagttgtagtgcacctctgcccagaaactcaagtatatgactgcaagaagagaaaaataagagaaacaattaaattggtgtgagcgaatgaatatcaagacttcaaaacaccgctcttacaaagtgcacatgcacaaagaaattgcattcatactttaatttctcttccaagcaatctcaagatttgcttgcccacacttggcttcatagtataggtatgatacaatggcatagaataaatgacatgcatacataaccaatataaagcttgcccccattcattaaacttacaaccgtctcataatcattcaatatgttaaaacagacaaattccggtctctaaaaggagaatgtgaatgtcaaagcatccatgttatgagatggaatttagatttcaaaagagctaaaacggacgactcttcaaaaatcaaaatctccttctcatgaaacgcaaaatcgaatttgcttaagattgtccttaagggttcatagtcatccattcatccctccttccccttgcgcaattttttggtcaaggcaggccgaggtactaactttacagtccaaagatcaaaagtactatttgcattcttcacgactcatgtaataaacttatgttgtctctttaactccagtggtcctactttatcagagtcgttatctgattttggacttctgaaaaagtttgatacaaagatcgtactaacttttccatagttggcacaaatttcaagaatcaaattcatccagtaaatcaggttgctctggtaccagctacttctataatttaatttactactattactacaatatgcataatcaaattatctgcttcatctccatgtgtagcctgtgtcgtctgaaacgccaatgggggagtactaatttggtggttacgaattatcatactatctcccctttttgaattgttgaatttggtcctgaaaaatgttgcggttttggctaaaagtctaaaactgcattgcagaaagtatcaatagaacgacataagaactcgataatggtttctcagttagtggaattacagctgaggaaagcatctttaaccgcaaactggaaatacgtacagcattaagcgactcgtgactttttatttgagacacatggaaattgagaaataggatctatgtcactcccacttccaaatatttttgtaataaaaacttgttcaatcgcattttgtgaagtagaggatattacagaaaggtaaaagcaattcaaagtttgagaactagcctacctctgtttgacttctgattcttcggaagaatctcgatgtaacatgtatccttgaatgacgttataacaagaattttcacaccatactgcccacaagacaaaaagacaaaatcaatgtgcaacacaagtaggttcattcacaaaccaatgcatcctagtctagcatcatcacaaataaaatcttcataaaaggagctgcgcatatacaataaataaaaaatgcatcataaccactcaaaatggagagtgaaagaaagaaatagcaaaatagaggcacatgaattaacaaaagctagtaaagcacccaatggaggcactataccaggacatccaaattatggtctggccaacaatagcttaagcttcttatattccaaggttaaaaagtaaaccaaagtaatcaaatggagagaaaaaaccaaggaagcaaataaggggaataatcaataccgagtcagcagcagcctgcaacgtaacatgatcgccccattccccactcctggttcaaccaatatataagcagatgttgatttaaaggagaaaagataatgcagaatttcaaaatggagaaacaaaggtctgagaattacttggacatcctcgtcaagtactctccatactccattgggacatatccctcatacatctccggatgatgttgaaactgacaagacaaaatgattttaaaaaacatactcagctaaaatgtatgtgaaataattcaaaaatgaaatcgaaatatcataaagaagattatcttattcacttagacaagcacctggctgactacttgctgtctgacaaatttgtggtgctctggtgtacgatagaattgatctgataaagcacggaactggaacaaaagaggacatgtgaatagatgtgcattagaaagaaataggatggaaccttatttcaacaaacttagaatcggaggcgaagcctaatccacttgggaaaaataggcaaagttcccataccccataaaactaaagagttgagaaaaaaattgaattatccttttgtcaaactactaaaaatccacaaatatttttaataaagttggaatggcaagcagcctgacaatacgtcacttgagtttcatattccaatttttttaaaaatcctattatgaaccacttcattcaccatttcactgtcacaaacaccaacaacaagtttctatcagagccaaagagttaattccaaagtaaggaatactgataaaccgtcatcaaacattatgttttttgtttttcattccctttcttctttgaaccagagagtaagacctccataccacctagcaccttgatatactgagatttttcatgagacaaacttaaagaattggggatccttcttttgtttatggttaaaaattatgctacaagtagtttaaggaaagggaaaacaatttttttctttcactagaaatcaaatcatgagcgtctctagacagtttgatatcattactgcaagacaaatcaaccaagtaatacagtaacctggcagttgccatctccttgcactttgtgctccaccaagtcaaataattgcaatctgaagcaagaaaaaccatagcatgggatccttagcaaagaataacttgcagcaataatattaccattcaattgcattggcaaaaatatcaacttcacaggaaacttaggtggcacaaaacctaataaaaaacacaacaatatcaacttcataggaagcttaggtggcacaaaatctaataaagaaacacaacaaaagaaaataaaatgaaaaaccacatgcattgtcctgtgactttaagaaaacaaagggttaatagtatctattggaatgtgcttcataagtgtttatttacaaagcacaaaatactagttggctcattccacaccaattattttctgtgcttgtctcggctcccatctctcccatttgattctcgttttctcaaaatgcttgaggggtcagatgttacttttcgaatagcaggcagtaagaaccaccagtaaaagaatgagttaataaagaaagagaaaacctaacaaaataaaaataaagaaatgtttctggagacacaggacccctatcacaatagaggtatgcatttctcacagtgaagctatatttcattaccttgaaaagtgctcagaatttggagagaattaagcaaagcactatcataagatcatatgtcattaacttgttcatacacaatttttatctacttgaaaacctaagtcggagggatcaggagatacctatttagcagcctttgatgatcagaagttgcttcatcgactgaaggtatgtccccatttattctaggaacatgctgcatggttaataacacaaattgttataagaaactaaagcagcctcaagaaaatggccataggtgcaaagcaccacacatgtcctcgtacacaaagtgaattagtgttctcaatatactaacagacactacacttacaggaacagcactcagctggtttattctcttccctacttctccatcaagctcaaattcatcttgtatttccaatgtgtaggtatactcttctccatcgtatgatctgtctccaggactcgaacaagaacttgaaggccctacatcatcagcttctaggctggtgtcatgccctgtgaatcatatataattagcaaatgtttaaactcaaggaacatcacagaattgaaaacaagaaatgtaccagcataatactctcttggaggagtatgccaatgttgtacaccagtggaggcttgcaaatactgctcgtctgcatgtgaagattcagcatcttctgcgatggacaactctgacaaatcttcttgtagaacatgagcaatagcctcatcattgtcaacattgcaatatgatgtgtgatagtggttttctctggcatattgttcatgacatatctcaacgtcatgctttctaccatcaccgtaatagttggaactaaaaagttggtccacatcgagaaaactaagaacgccacgagcagcttcagattccggctcacacat

SEQ ID NO: 23 - DNA, 1260 bp, Nicotiana tabacum
atgccttcacttcttcaaattttccttcctttgtttccattctttttcttggtttctttctcagtttctcacggaccctttttgccaaaggccattattcttcctgtaaacaaagatctgtcaacttttcagtatgttactcaagtttacatgggtgctcatcttgttcctaccaatttagttgtagatcttggaggttcatttctctggactaattgtggcttaacttctgtatcttcaagtcagaaacttgtcccctgtaattcactcaaatgctcaatggctaaacctaatggttgcactaacaagatttgtggtgtacaatcagaaaatccttttacaaaagtggctgcaacaggggaattagcagaggacatgtttgctgtggaattcatagatgagttaaaaacaggttcaattgcttcaatacatgaattcttgttttcttgtgcatcaactactttgttgcaaggtcttgctagaggtgccaaaggaatgttaggacttggaaattcaagaattgcattgccatctcagttgtctgatacatttggtttccagaggaaatttgctctctgtttgtcttcttcaaatggtgctataatatctggtgaaagtccttacttgtcacttttgggtcatgatgtttcaagatctatgctttatacacctttgatttcatctaaagatggtgtttcagaagagtattatatcaacgttaaatccatcaaaattaatggcaagaaactgtcgttaaacacatctttgtttgcaatggatgaaggtgttggagggacaaagattagtacaattcccccttttaccaccatgaaaagctcaatttataagtcatttattgaagcttatgagaaatttgctatttccatggaattgaataaagtggaagctatagcaccatttgagctttgctttagcacaaaggggatagatgtcacaaaagtggggccaaatgtgccaactacggatcttgtgttgcaaagtgaaatggttaagtggaggatttatgggagaaattcaatggtgaaagtaagtgatgaagtgatgtgtttgggattcttgaatggaggggtgaatcaaaaggcttcaattgttatagggggttaccagttggaggataatcttttggagtttaacttgggaacttctatgcttggatttacttcttcactttcaatggcagaaacaagctgttctgactttatgttccattctgtatcaaaagattcagcttttgattct

SEQ ID NO: 24 - DNA, 3290 bp, Nicotiana tabacum
ttaagaagaatgagaagtaaacttatttgttgaatttaagaggtaagaatatgcaaaagtagcatgaattgcagcaccaattggaaggacatcctcatcaatgatgaaatgtggattgtgtggagggtaaatagcaccaatcttttcattttttgttcccaaaaggaagaaggaaccaggaactttctctaaaaacactgcaaaatcttcacttcccatgaagctaggtgctattttgaaactctcttccccaacaatcatttttgaaacttttcgggcatgttcgtatattctctcatcgtttattgttggaggaagtgttggattttctcgaccatcaaagtcaatctcgaccgtacatcgatgtactgctgcttgtgctcgtatcacctgaaaattttaccaataaaaagtttaattaccaaatattgaatataataatatgttctaaaaataacatggatgtctattcctaattattagcaagttatttcattctccctagttgattagtgaattactgaaaggttatggcgttctgatattgttaaatgtaccacttattttattgaaaagttatattgcatctctaaagaactgaaaagtcatttgacctcttggctcgtgacccttctcaaaaaacagttctttggctataaataagattattttgtgttgaatgaatatatcaagcaacttgaaaatattaaaacctctttcccgaaacaaatcctacaatttcctcaagtactcgtcttttcaaacaaagtattaatgaaaaagaaacgtaacttgtttgaataaataaaatttgcacatataaactttgtaaagagacgtgtgggactttgaatattggtcaaagtatccaagatttttgttctaaattacaagtagtttacctcttcaattcttttcctcaaaccgtagaaactcttcttactgaatgctctataggtcccggaaattgtagctaattctggtatgatattaaatgcatgccccccttcaatcatggcaacagaaactacctgaaatttcaaaaactaaatatataagaattgataaaataaaaatttaaaatttgtttgaataagtttggaaaagaaaattgttaatctctatgtttcaaaaagattgttctagtttgacttgacacaaattttaataaggaagaaaagactttgagatatgtggtcctaaataaaccatatcatttgtgtgactgtaaaacttttgaaacttgtgatcttaaacttactataacatttgtgtaactataaatgcttctaataaaaaaaatattaaaatttgtcaatttttttgaaacagaccaataaataaatagtgtcaatgcttttgaaacggaggtagtacctgggattcaagaggatcagtctctctagagacaatactttgcaaactaataacagaagtagaagcagccaaaattggatcaacagaatcgtgtggaacagcagcatgacctccttttcctctaattgtagctttaaagcttccacatccagccaagaattcaccaggcctagatgcaactactccactttcatacttatgaactaagtgcattccaaaaatggcttccacattttcaagaactccttcttctatcatatctttagccccatgccctcgttcttcagctggttgaaaaattaacaccactgttccctgcaatattattatacacggtaattaaattcattacttcaactaatccattagcttagaagtatgtatttagagcttaattaagggttttatttaacctgtaaattgtgtcggagttgttgtaatatcttggcagcaccaagaagcatggcagtatgggcatcatgagcacaagcatgcatttttccatcaactttgctcttgtgctcccatttcgccaattcctacattagaagaattcaactttgactcacgactcttttattgatcaaattattcactttatagatttttgaagaattgattaatcgagaataaatatagagtcctactgtagaggcatattatatgatattgacctctacaacttataaaacccgacttatgatctttattttctttttctgttgtttagatcacaattgatatttgatgttcaaattaaatgttttagcggtgtaatattattacttatggtactttcggccatcctatccaattttactactaggaaaataaaaaacgtgttgaccctttattccacaacatatgaaactaaaagtaaaaagagatggtcaccatagaagaaaactagctaaagtatatacctacgaattgaagtgttttctctttcccaatgaagttccaaaattcaagaatctctttgttttaggtataattaagctgtttcgaactctatacttaattcaatattaagagagatctgatttattactttcctttcatggcttaaatattaccgccgccgccgccatttctgacaaaaacggaaagtaaactgccgcaagtaatttcttcttctgccatagttaatttagtcgcccacaaaattaataaaatgactcaaatttactgcctacaccctagttccgaccgaatacaacatataaatgatccccgtgctgttgtcatctcgaacatccttaataacaatctccaaaaccattaatgaaatacagacaaaggtaagaagtaaatttgaagatatatagtactatattaggcctatagatctacctcctaaactccacaaactgtttaaagtgaataaaacatttaaagagttcatatcaattttttttgatatgaagagttatccgtggttataaatgaactaaacgtgatactagtataaatattcttaccgttttttgttttgaatataattgcagggttgagaaaatttccaagcagagactactaacctgaataggcaaagcatccatgtctgctctgagagccacaaatggcggcttaccggagccgatggtggcaacaactccggtcttagccaccggccaccggtactttactcccatccgatcaagctcctctctgatcaaaccactcgtcttaaattcttcataagcaagttctgggttctcgtgaatttgtctccttattttcatcatccacttcactgtctccgtagcatttgctaattttgtaatataatctttcacgtaacagttttgatctaccaaaaacggattcaagcactcatcatcgccgtgacacgaaggaaaaacaatgaacatacatacaagcaccaaaattagaacttccttagcacccat

SEQ ID NO: 25 - DNA, 2836 bp, Nicotiana tabacum
atgaaactgaatccttactcatggacaaaggtaagtacttgattgtgaattataactgtattatgtacataaggtcgctgcacaacacaaaatgttgaaaataagatggaattattaggtggcaagcattattttcttagacttaccagtaggcactggattttcctatgcaagaactccaacagctttacagtcatctgatttacaagcaagtgatcaagcatatgagttcctttacaaggtaattagattcttcacgaaattattagttaaatgtattttctcctttgcccctcaatgttgttcaatatgtagtagaacagtcaataattttatgttgtttgcagtggttccttgatcacccagaattcttaaagaatccattgtatgttggcggcgactcatattcagggatggttgttcccatcattactcaaattatagcaactagtaagactatattttccctcaaatagttgtgaaacaagtaatggcagcctaaggtagtaaggtgttctgttcttgtactataacattttgtggccttgtgataatgcagaaaatgagatgggaataaaaccttttgtggatcttcaggtttgtcatttttcttgtatatattctcttttccctacggataagcagacggattacataccaactcagaatttgtaacgaaattgttatgagaatgtcacgacccaagcccatagcatgtattgtctgctttgggcctaggctcgcacggatttgtctttcgggctacgccacctcgagccccaaaagcgcgtgcaccatgtgaacttgtgtcataccttataaagttcatcactttcctctattattccgatatggggattcgtctaaggtgacatgtgcaccgcttattcagaagtttggcagcctagaagctagtcagtcctacttaacttgccctcatcagccccctccttcatgggcatcacacagaatcaaaagtcactgtagaatgtgagttgatttgcaaaatgtatgacctgatatctctcgtcaagtggtttcagggatatttactcggaaatccatcgacttttaaaggtgaaaagaattatgagattccatttgcttatggaatgggacttatttctgatgaactctatgaggttggttttcctttggtgttatatagtacagtcaaacctttctataatagctacatttgttccgatattttttggatgctataatgaagtgttgttatagaggatatatattagtataacataacatacaaaatcggctccgagaaaaacttggctttatagtaaatgactattatatatggatgctgttatacagaggtttgaccgtaagatcttaaatatcctccagttatgcgctttaatttagtttgcttacattgtccttagaactaattgatttccctttctcaaatagtccttgacgagaaattgtaaaggagagtatcaaaacactgatccaagcaatacacaatgtttgcaagatgttcatacttttcaagaggttggatcctattttgaggaaaatcaaatatcatctgtttgttttatgataggttcattaacatactgaccttatgcagcttctgaaaagaattaataatccccatattctggagcccaaatgtcagtttgcttcaccaaagccacacctattgtttggccaaagaagatctcttaatgtgaagtttcatcaacttaacaatcctcaacaactccctgcgctaaagtgtcgcgtgggtactcatcaacaaactctagcattctttatgctattgattttttgtttcactgagatacttacgagaatttacaacttgcaattgatttagaatgattggtacaaactttcttctcattgggctgatgatggccaagttagagaggccctccatatccgaaaggtacgttagttcttgttggaaggggaaccttggagcaacggtaaaaatatctctgtgtgatctatagagcacggatttgagccatgaaagcagtaatgcttgcattatgataggctgtctatatcacacccttgagatgcggccaccttgcatgaatgcgtgatactttgtgcatcatgctgcctttttttttgaagaacaacaaaatttaacaaagtgtgctacacaaaactaaaaatatgatcaatttgattacagggaactattggaaaatgggtgagatgtgcaagtttgcaataccaaaagacaatcatgagtagcataccatatcatgcaaacctcagtgctaaaggttacagatctcttatatacaggttgagtaagattgttgtgtttgcaagattggaataactacataaatagttgaagattattatctctgtgaaactatttacttagttttctatgttttttgaattaagcagtggagatcatgacaaggttgttaccttcctatcaactcaagcatggataaaatctcttaactactccattgttgatgattggcgaccgtggatcgttgacaatcaagttgccgggttagtttatgatgaaaacattgtacgctagtcataagctctgtcaaggtatagaagttaaactcattttttgtcttttgcatgattgtagttacacgagaagttactcaaatcggatgacatttgccacagtaaaggcaagatatctctttcacttgcttttctcagttaagtttgaagataaaaaattttgttaaatagttggtgtttaaattgcactattttgttacagggagcagggcatactgcaccagagtataagcctcgtgaatgtctggccatgctcaaaaggttgatgtcttacaagcctttg

SEQ ID NO: 26 - DNA, 5591 bp, Nicotiana tabacum
atgtgtgaaccggagtctgaagcaactcgtggggttcttagttttctcgatgtggaccaacttttcagttccaactattacggcgatggtagaaagcatgacgttgagatatgtcatgaacaatatgccagagaaaaccagtatcacacatcatattgcaatgttgacagtgatgaggctattgctcatcttttacaagaagaattgtcagagttgtccatcgcagaagatgctgaatcttcacatgcagatgagcagtattttcaagcctccactggtgtacaacattggcatactcctccaagggagtactatgccggtacatttcttgttttcagttttgtgatttttcctcgagtttaaacatttgctaatttatatatgattcacagggcatgacactggtctagaagctgatgatgtggggccttcaagttcttgttctagtcctggcgacagatcatacgatggagaagagtatacctacacattggaaatacaagatgaatttgagcttgatggagaagtagggaagagaataaaccagctgagtgctgttcctgtaagtgtagtgtctgttagtatatcaagaacactaattcactttgtgtacgaggacatgtgcggcgctctgcaactttggccattttcttgtcactgctttagtttcttataacaatttgtgttattaaccgtgcagcatgttcctagaataaatggagacataccttcagtcgatgaagcaacttctgatcatcaaaggctgctagataggtatctcctgatccctccgacttaggttttcaagttgacagaaattttgtgtatgaacaagttaatgacatatgatcttatggtagtgctttgcttaattctctctcagattagcactttccaaggtaatgaaatataagttcactgcgagaaatgcatacctctattgtgattaggtgtcctgtgtctccagaatcatttctgtattttttttaggttttctctttctttattaattcattcttttcccggtggttcttactgcctgctatttgaaaagtaacatcaaacccctcatgcattttgagaaaagagaatcaaatgggagagatgggacccgggacaagcacagaaaataattgttgtggaatgagccaactagtatgttgtgctttctaaataaacacttacgaagcacattccagtagatactgttaaccctttgtttgcttaaagtcacaggacaatgcatgcggtttttcattttgttctgtttttttattaggttttgtgccacctaagtttcctaggaagttgatattgttgtgttttttcattaggttttgtgccacctagtttcctatgaagttgatatttttgctaattcatttgaatggtaatactattgctataataacttattttctgctaagcatcccatgctgtgatttttcttgcttcagattgcaattatttgacttggtggagcacaaagtgcaaggagatggcaactgtcaggttatcatattacctggttgatttatcttgcagtaatgatatcaaactgtctagatgcgctcatgatttgatttctagtggaagaaaaaaactgtattccctttccttaaactacttacagcataagtattaatcttaaacataatgtttatcagtattccttccttttggaattgttctggtagaaacttgttcttggtgtttgtgacaatgtcttagctttctttattactttttagttatgcttgaaaacagtggaaacagtaaagttatctccatataaagttgtctctgtgtgacatataggtcatgagtttgagccgtggaagcagccattaatgcttgcattaggttaggctatctatatcacaccccttgggtgaggctcttctcgggaccctgcgtgaatgtggtcgggaccctgcgtgaatgtgggatgctttgtgcactgggctgccattttagttatgcttgaaattctcaactttttaattttcatatttggtttttacttgtctattctttccattagccttaagcagttgctcactgttcatcatatttcatttaagtttgtgaagtgtgtgagaccatatacaatattgctgaattatgatatacattggggattggcaatttcatttaaattgaattctttagtgattagttcaataaagtcacaaaaagaaaatcggacttgaattattgatttgggagttatttaattatgaaatgaatactagtaagaagcgagtcaagaaatttgagactgaatgtgaaaattggatggaagatgttcacggagaaaagctgattaatagtaatgttggtaaaataggaagggattagaactcggataatgaatgtagagcgaactacaaaatataagaagttgagagttcggatggagttggggggatgggtggtgaatggaagtggttcataataggattttggagaaaaactggaatatgaaaactcaagtgatatatcggcaggttgcttgccatgccaagtgccaactttatgaaaattatttgtggattttcagttagtttgacaaaaggacaattcaaattttttcttaactctttagtattatgggggtatgggaacttagcccgtttttcctttctgtgaattaggtttcacctccgattctaagtttgttgagataaggttccatcctatctctttctaatgcacatctattcacctgtcttcttttgttccagttccgtgctttatcagatcaattctatcgtacaccggagcaccacaaatttgtcagacagcaagtagtcagtcaggtgcttgtctaagtgaataagattatcttctctatgatatttcggttttcatttttgaattatttcacatacattttagctgagtaggttttttaaaatcattttgttttgtcagcttaaacatcatccagagatgtatgagggatatgtcccaatggaatatggagagtacttgaagaggatgtccaagtaattctcagacctttgtttttccattttgaaatcgtgcattaccttctctcctttaatttacatctgacttttatattggttgaaccaggagtggggaatggggcgatcatgttacgttgcaggctgctgctgactcggtactgattattgcccttactttggttccttggtttttctctccatttgattactgccttttggtttgtttcttaaccttggaaataagaaccgtaagctattgttggccaaaccataacttggatgtcctcatatggtgccttctttggatattgtagtagcttgttaattgcaagttgatggtatgtaggaagtaacatgcttctatagaatttgtgatcctgtagtttttcatgagtatgtgttaatcctttattttgtagtgtggaagaaaatgtgtgtttatgtgcctctcttgctatttttttctttcagtctccattgtgtggtcgtgttgcattttttattgtatatgcttagctcctttacgaagattttgcttgtgataatattagatgaggatggattggtttgtgaatgacctatttgtgctgcacattgaattgtctttttgtcttgtgagcagtatggtgtgaaaattctcgttataacgtcattcaaggatacatgttacatcgagattcttccgaagaatcaaaagtcaaacagaggtaactagttctcaaattttgaattgcttttacctttctgtaatatcctctacttcatagaatgtgattgaacaagttttcattaacaaaatatttggaagtggtagtggcatgaattctcaatttccatgtatctcatatacaaatacatgtgtcaccgaattgtgtacgtacttccagttcgcagttaaggattttccccaactttaattccactatgtgagcaacccttacaaagttcttcaaacattctttattggttatttctgaaatgtggttttagacttatagataataccagaatattatccagggccaaatttcaacaattcaaacaaggaaagatagtatgatcattcttaacaccactgtagttaccccccattgaattttccgataacgagggctacacatggagatgaaggagatgatctgattatgcatattgtagtaatagtagtagataaatttataaaagtagctaatactagataacccgatttattatctgagtttgattcttgaaacttgttcgagttatggagaaactagtatggcctttgtataggacctttccgaaagtcccagatccgataacgatctgataaagtaggaccactggagttatgagacaacattagtctataatataaatgatcagaatattgcaacagaaaacatcagttgtctctttcctctcttcgatagaggcaaaggagattgaatctaattgattccgaaatgcttcattggatattcaatagttaaatcgaactattcatcttgcaactctgaaaacagacgtgctatacatgcagtataagagcaacataattaacatacactaggttggaggtttacttatctatgtttaggtggtcggtttatgtgcaagttttccatttttcaacaatttagagttatcagagctacttataagacatgatacttttgctgtatttaactttttttgtaaagttcagcaagagtttttgctagtccgagtggaaataattatttgttgactacccattttccctttttacttgagaaaaagattgagaggggggaggcagagcagcatcatgagtcatctggagaatgcaaagagtacttttgatctttggactgaagagttagaacgttggccttccttgataacaaaattttcaaggggaggggggattaatggatgactatgaaccgttatggacaatcttaagcaaatccgatcttgggtttcatgaaaaggagattcccaagggttgaccagttttggttgttttgaaatctaaaagatggactgatgagcatccttattgcctttttagagacctaaagttgtctactttaacatattgaatgattatgagacagttctaagtttaatgaatggggacagctttatatcggtcatgtatgcatgacatttattccatgccattatatgatacctctactgtgaagccaagggtgggcacaacttagcaatggatacttaaatctggagattgcttggaacatctttgtgcatatgcactttgtaagagcgatgtttgaagtcttgatattgattcgcttacaccaatttaattgttttgtttctctcgtttttctcttggtgcagtcatatacttaagtttctgggcagaggtgcactacaactcaatctatcctcaaggaggtagttgcttgtacatttatctcctgttcctgtttattttgtcttagcattgagagttgagtgggagtttgctgatcttgcttagtttagaattccattctattatcatattattctaatactgtagtttgatgctccattctagacttcctgccatttgatcttaagaagaagaagaagaagtggagtttctggaacaagcat

SEQ ID NO: 27 - DNA, 1266 bp, Nicotiana tabacum
tcaagaatcaaaagctgaatctttcgatacagaatggatcatgaagtcagaacagcttgtttctgctgtagacagtgaagaagtaaatccaagcatagaagttcccaagttaaactccaaaagattattctccaactggtaaccccctataacaattgaagccttttgattcacccctccatccaaaaatccccaacacatcacttcatcacttactttcaccattgaatttctcccataaatcctccacttaaccatttcactttgcaacacaagatccatagttggaacatttggccccacttttgtgacatctatcccctctgtgctaaagcaaagctcaaatggtgctatggattccactttagtcaaattcacggaaatagcaattttttcataagcttccataaatgtcctataaattgagcttttcatgctagtaaaaggggaaattgtactaatctttgtcccgccaacaccttcttcatccattgtaaacaaagatatgtttaaagacagtttattgccattaatttttatggatttgacattgatgtaatactcttctgaaacaccatttttagatgaaatcaaaggtgtgtaaagcatagatcttgaaacatcatgacccaaaagtgacaagtaaggactttcaccagatattatagcaccatttgaagaagacaaacagagagcaaatttcctctggaaaccaaatgtatcagacaactgagatggcaatgcaattcttgaatttccaagtcctaacattcctttggcacctctagcaagaccttgtaacaaagtagttgatgcacaagaaaacaagaattcatgtattgaagcaattgaacctgtttttaactcatctatgaattccacagcaaacatgtcctctgctaattcccctgttgcagccacttttgtgaaaggattttctgattgtacaccacaaatcttgttagtgcaaccattaggtttagccattgagcacttgagtgaattacaggggacaagtttctgacttgaagatacagaagttaagccacaattagtccagagaaacgaacctccaagatctacaactaaattggtaggaacaagatgagcacccatgtaaacttgagtaacatactgaaaagtggacagatctttgtttacaggaagaataatggccttaggcaaaaagggtccatgagaaactgagaaagaaacaaagaaaaagaacggaaacaaaggaaggaatatttgaagaagtgaaggcat

SEQ ID NO: 28 - DNA, 3099 bp, Nicotiana tabacum
ttaggcctcaatcagttctctaattggtttgctgtttatgttagctgatgggatattagtgaattcagagagtatagctctgaattcatctcctgtaagagtctccttttctagcaacacatccactaatttgtcgattgcctccctgttgttccttatgtggttctttgcaatttcatatgctctctcaattatgtgccttaccgatgcatcaatgtcttctgctagtttctctgacatttgattcctcgccagcattctcagcaccacatcaccactctgtgttgctggatctgttaacgcccatggtcctatctcagacatcccgaacattgtcaccatctgctcatgatataaacattggcaagttaatacttgtgtgtattcgaatatgttgttctcttttaatgtggtgcaacaagatgatgtgttaagtaaatacctgtcttgctatttgagttatttgttgcaagtctccggctgcaccagtagtgatttctgcttcaccaaaaattatttcctctgctgctctacctcctaagcttccaactattctagcaaaaagttgctgcttagatatcaaggttggatcttcaccaggaataaaccatgtaagaccgcgagcttgccctcttgggatcaatgtaactttctgtactgcatcatggccaggggtcaatgtcctataagcacaaggacacattctttagtactgtgtcttttgattacaaataacaaactgaaaagattgaatacttagacagcttcttaaatttgtccggttttttcatctaaacaccttgtctaagggcctgatatattgaacacttgatgttagttgaaaattcaataaggagcaaattactccctttttttgcttcatgtataatctagtataaatgaaaataatgagaggaaagaaatgattgttaacttacgcgcagacaccatgtccaacttcatgatatgctaccaaaatcttgtttttgccatctgtcatcttggttccttccattccagcaacaattctatcgatggaatcatcaatctctttcgaggtaatcttatcttttcctcttcttccagctagaatagcagcttcattcatgaggtttgcaagatctgcaccactgaatcctggagttctcattgcaataacacttagagacacatctttatcaagcttcttgttgttactatgaaccttcaatatttcttcccttcctcttatatcaggcagtccaacacttacctaataaaatgaaatatcaatataagtgaagtgtattctggaaactgtataatacacctcattttattggaattttacaatcaaaatctcattttatacctgtctatcaaatcttccaggtcgaagcaaagcttgatcaagaatttcaggcctattagtggcagcaatgacaatgactccagtgtttccagtgaaaccatccatttcagtgagaagttggttaagtgtctgctctctttcatcatttccaccgccaataccagttcctctttgcctcccaacagcatcaatctcatcaataaagactaaacaaggtgaattttcctttgccttgttgaataagtccctaactctagaagctcccacaccaacaaacatctcaacaaactctgaaccagagagagataagaatggaacctctgcttctccggcaatcgccttagctagcaatgtcttccctgtccctggtggccctactaagagaactccctttggtatctttgccccaactgctgcaaacttttctggggttttcaagaactcaacaatctcttgaaaatcttgctttgcatcatctaccccagccacatcatcaaatgttactcctgtatttggttccatctggaattttgctttgctcctgcattattcacaaacaaatactagttattagtagttgttgaagattacatcactagacataatgttcaatcttgatcatgtttatggaatttctattatagcatactgttgggtttcttaaagagatggaaatgattgaaattgtctctcctaagttttattaactatagagcgatttaaatagccaacttgaaaataaaatacacaaatttataaaatattgaaaaacctaaaatatctcaacaacctaaaatatctaaccgaaatttaaattcaaacaaagtagactacttttaccactaaaaattactccttctatttcaatttagatgatacaatttcctattagtacgttccaaaaagaattatacatttctataattgaaaataattcaactttaaactctttattttatctattttaaccttaataaaaaacttttataactacacaaatatcatgccccccacaaagcttttacctcttaaactttttcaaaagtcttctgttttttttttttaaactacgtgccgagtcaaactaactaatttaaatttaaaccgaggaagtattattctagtaaattaacagtaacagaagctatatacaagacataccttcctaatccaaaaggcaggtttggccctccaggagtatttgaagaagaggttctcaacagcaaagagccaagcaatatcaatggaaaagctaaattcccaagtaaatcaagaagtggccctatgacattcatttcagggagatgagcagcaaaatctacatccttctctctaagttttctcaccaattctggtggcaatcctggcaactgaactttaactctctggactttgttaagagcaggattgaatatctcagcaacagcactactctcaaaaaaatcaacttttttcacagcaccttcattcaagtattccaagaatcttgaatatgacattctacttgaagttgcttcaattggtgcttcagtttctgctcttgctggtttagccaaagtccctgctacaaggctcaaaccactaccactcaacagcttcctcctatttattctggtgtctgaatatgatttttgacatggggtttctttactaaagattttaggattgttagtatccttagaaagatcttgggatttgcataggggaaattgaatgacagacaaagaaagggcaggggacattttcat

SEQ ID NO: 29 - DNA, 701 bp, Nicotiana tabacum
ttaggcagtgggataagaagcgtccatagcaagtccacaaaggccttctttctcatgaacatcccttttgatgcgcatatatccactgtcaccccatttactgccccatgaattctttataatccaatattttgtaccgtcagttgttgcaccatatcccactgctgtaacagcgtggttaagccaagtgctgcatgatccactgaatacaccacttgaatagaactggaaatcgaagctactcccgtctattgccaccgaaacaggttgattagccactgcctgcaatagagccttctcactgttcgctggcacatcttcatatcctgtaataagaggcgtaagtcataatttcaagcttatggattcggaatatttatcgtttgaagttgctgggctagatcataattaaaccaactcacccaattgaagatttgttctaccccttatatttttatgggcttacctgtaattttggctgctgaaagagctgactttttcttgttgcagacaccatcttctcctttgtatggatagtttacttctgttgtgaggcccttgtttttcaggatgaaatcaaaggcagtgtccaagagtccaccgctgcaaccttcgtcctcgccttcgacatcacagtctacaagctcttgctctgataaagggatcaactctcctgttttcagttggtgtagcccttccat

SEQ ID NO: 30 - DNA, 6366 bp, Nicotiana tabacum
  misc_feature (2159)..(2347): n is a, c, g, or t
atgggatgccgcatgaaattcttgaatgtggttttggtggtggcggcggtgatggctgctgccgccgccgtggccttcggagctgagaaattgccggcgggagtgcttagtttggaaaggatttttcctttgaatgggaagatggagctggaggaggttagagcaagggacagagctaggcatgctcgaatgttgcagagttttgctggtggtattgttaattttcctgttgtcggttcatctgacccttatcttgtcgggtaattactttgttacgaccaatttgataagattatatttgtgatgtttttagtgttttcttcctttttctaatgtggagttatattgctatatttgctatattttatttggtatgatgacgatgatatggcttgagcttaaatggagaagtgatgattggtatagcggactccaacttgtttgggaccgaggcgttgttgttgttgagttttgtttggttaatttagtcattttttggaaagtttgattctttatgatgttaaaacttggaacttttggtgaatgtatggaagctatggactatttgatgtgttattaacgtcttatgaatttgatctcatgaattctgatgtaaattttgttttagtttgagggtaattgattttaagtgtattaaagtacttgtaacacaatgaattttggtgtgctgtttttcttttctaggtgctttcttgttaattatcggttggatggtgttgttgatggtagtgatagttctgtttgctttatcttgtatcgtttcttgttcaggtgcaaaatatttaggtacaattgaatgatgagtttcgtgttgctctgaatatgaacattagctatatcagtttggcatttgctttctgttatttgtggatgagggatattcttattgatttgactatcaattttgttgaccatcgtctctttctctctcttctatgcttttggtgtatttgtagcctttattttacaaaagtaagactgggaactccaccaagagaatacaatgtgcagatcgacactggcagtgatatcctatgggtcacatgtagttcctgcgatgattgtcctcggacaagtggacttggggtaactcatcttcccttcatcttgttattacttttttagtttcttgtttaaagtgtggtgaaggaataaactgttacgtgggtgcaggttgagctcaacttctatgatgctaccatctcgtcaactgcttctcccatttcttgtgcagaccaagtgtgcgcctctatagttcaaactgcctccgctgagtgctctacggaaaccaatcagtgtggttactcctttcaatatggagatgggagtggcacaactggccattacgtagccgatttactatattttgacacagtcctgggaacttctttgattgccaactcttcagcaccgattatttttgggtgagttcttattttttaaatacccctatatctatacttaaaatttcattagaaatagttgtgggtcatttgaaccagaaatatctttggcccaatttacaaaaaaaccatgtttgtttactcaaagcttatacttggatatgatttaaaacaggtgcagcacctctcagtctggggacttgaccaagacggacagagcaattgatgggatatttgggtttggtcaacagggtctttcagtaatatctcaactgtcttctcatcggattactcctaaagtattttcacattgcttgaaaggagagggaaatggtggaggtatactagtccttggtgagattttggatccgagaatcgtatatagtccccttgttccgtcacagtacgtattgttacagtacaatgaagtttcttttcttgcttatgacgaatatagagatttaattgttttcatctttagtgtgccttgtgctacatgatataaaacagttgtgttctttatagtttgtgatccagcttgagcatgtgaaatatacctctcatgcgctacatcctgattttattgaaatttcgtcactatattattggttttgcatctacagatatatagtagttgggtcttgggaagatgacatcaatgaaactttactttgtacatataaaaaagggcagcccggtgcacaattttgagtgttatatatatatatatatatnnnnnnnnnnnnnnnnnnnnnnnnnnnnnnnnnnnnnnnnnnnnnnnnnnnnnnnnnnnnnnnnnnnnnnnnnnnnnnnnnnnnnnnnnnnnnnnnnnnnnnnnnnnnnnnnnnnnnnnnnnnnnnnnnnnnnnnnnnnnnnnnnnnnnnnnnnnnnnnnnnnnnnnnnnnnnnnnnnnnnnnnnnnnntgtgtgtgtgtgtgtgtgtgtgtgtgtgtgtgtgtgaacatgtcgatatatgtgtttattttttatgtttttctacattatttgttttctaactataagcacggggattggctgggcactaggaaagaaaatggtttgtagcaagcttgattgtatccgctttccacttttgcagggcgcattacaatgtatatctgcagagcattgctgttaatggacagttggtgcctgttgatccatcagtgtttgcgacatctggcaatcgaggaactattgtggattctggtacaactttggcttatattgccacagaagcttatgatccctttgtcaatgctgtaagttcctacattttgccaatttatttactccctccgtctcaacttgaatgtccaattgctctctttgtctataccaaaattatatccacatctcctaaatataaaaactgaccacataacaacaagaacaactacgcctgttggggttggcgaaaaagggcagataactgttgatcaaaacccctgaaaaatgttttatcattcatctgcagataactgctgctgtttcaccatcagttaggccaatcatctcacgaggaaaaccgtgctttctagtgtcctcgaggttcatccttgtataattcaatagatatttactttgagcttttaatgacaaaaatgtctttacccaactgctttggtgactcgaatatgacaccctgttttgttctgaaaacagcatagcagagatatttcccccagtttctctaaactttgatggtggtgcatcgatggctttaagaccatcagactaccttgtgcatatgggctttgtcgtgagtaccagaatctgtattgtgtttgaatgtcttcttgaagtctcatctgagactatatcaacaatgctatatgcagcactattgtctttttgatgaactacaaagctaagtgactcaattgaatgtttctaacaggaaggtgctgctatgtggtgcatcggctttgaaaaacaggatcaaggtgtaacaattttaggaggttggttccttgtttactacaatatttatgcctcaaccccaagtgggttcgctggtgtatttatcaacatatcttctaggactatggttacatctaatatctgctgcatcattacgtgtgctagcgtccttaatgggtgcttaagcactccatcactcaaaccatctaaaaaggacctaactataccttgtcctgtattaatttaaaaaaaaatataacttggcgagtgtctgcctagatggaatgtaccttagtgattgcatgcttagataaagtcatcattcctgcagatatcgatgttgatgaaacacggccatccattttctattagaatattaggtcattgatttgcaatttgaaaattgtagcttgaagattgcagtccctttgtcttttctaattttgcatccgttcttttattgtgattgaccagaggataggtatacttgtagtaccagtaattcggttagatatgttccgtagcgtgccaaggaatttatatttcctgttttgcctagtttttcgaagtttatgtcaaagttacttgctttggattccgtgcgtgggacaactatatatcttgtagaggcagtgattgttactttgatgttgaaagacagcagagggtggaattcatagaaagttaatacgtggaaaggggtgttagactggatacatgactgcagtcctaaatcaaggttggagttgcatttaatatggctattcctaaaggctaaaagacacagtctcatcaagattgtatgttgagaacaagtctacgagagtgcgctctgactgttctcagagataggtgcctcagactctagggattaagctaactacgtgttttgagtggtgttttgttctttcttttcctttttcactgctggctaacacaacttgaagacttgaattccaaactgcttcaagttttaggtctattattcatgccttctaacttcttagagtgttggttccctagtcctcttttttttccaactcgtgcatgcacgctcatgcccgtatacgtacatgcaagacatctacagttgtaaacacaatttatgaccaaatattaacggaaaggtattaatccctttctatttcttgtttgtgtgtgtatgtgtaaaccaagcacaatgttatgaccaacattaagtgaagagaattaatcttcttttcttttggcccatgtccgtgtattgtatgcgcattgaatgtgtgagcctttccttgtttatcctggttatgagttaatcggtagcatacatggtgaggtttcaggatgcatgatagttgcagatgatagtgtgaattaacaaaattagtcaaaagcagctccatggtgaaacacttagcaaggttttggaataagtggaaacaagatactatccaggcaatgcaagtttactccgcctaaaaagtattaaggtgaaatgatattagattattatggttcctaaatgctggcagtcaagttatttaagctcaaatcttccaggagaatagagaaatgtcgtggtagatgaggaaggaacacatagaactaaaatatgctggttgacatgaaagagtgttgcatgagtgttattagacagaaagattcctagaaaattgaaatataagttagtataacggttgtgagatcaacaataatatgtgagagtgaacattacatgtccgctaattgaatatcataaaaatgcggatgtaaagatggttgtgcaatcatataagattgaacatgattagaaacaatcacttttgttgaagggtgcaagtagggcacatatagagcatgaaaaggacgtcacatgagatggtttggccatatcctattagtccgccatatgaaccggttattaagtgtggcaatattgtgtttaaagtgctgaaaggaacgaggtagactgatgactacattcaaaaatttgtctcaaatgacttagaatctcatggagtcaatacggcttgaactataaacaaaaccttatggaagaaatggatccatataggcaatactaactagttgaaataaggcttacttgattttactctactgggtgcagtatttgtcaggagtctttataatttggttagagacatgtttgtaagtgttggtataagttagagatttagagaacctctagatttaagagaaccccttgtcttaaaaagattatgtactatcggagtgaattatttcaaaaaaagaagattatttactatcagagtgaattgggttcaaatagagcagaatggccccaaatgatattagacctcaactagtttgggacagaagtgtagttgatttattgatatgcatcttatgtgcaaattttattttagtcatgcgtgtgcccttgagctccttcctcttccctcttccctcctagtcattctactaaatttggctattcaattagttctggctatgctttggcatttgaaccatgtattccttgtcagttgacttattgcattgctctgcatcttcatttgtcgagtattctggatccatagataaacaagaatctaggttggtctaactgtatttttcttgattttcagatcttgttctgaaagataagatctttgtgtatgacttagctcggcaaaggattggatgggcagattatgattgtaagtacctcttttcaaaaatgaagtcaacatttgcttttgtctctattttgcccccttttcttttggggtggggagggggttgtttgttgtgacatgacttacttcttccctctgattttctctctatttttaatggttttcatgattaatgtttttattataggttcatcatctgtgaatgtgtctataacctctggcaaggatgaatttatcaatgctggacagttaagcgtgaaccgtgcatcaggcagtttgctgttcaatccgcggcacactagaactatatttcatctgctatcgttggttctgatgattggttccccatttttaact

SEQ ID NO: 31 - DNA, 4587 bp, Nicotiana tabacum
tcaagcaacaatagggtatgatgcgcaagttgcaatacctacaaacatatcattaggatcagttatttacctcatcaaaatcatgactacattgactagaaagtttttattattatttgtgtcgatctaagatgaactcaacttgaactcgtatatagaatagcattatagttcagattttgtggcctctttttttatggtccaagttgaaagttatttttcattaatttatcctaatagaataagctttcacaatccgaaagcagtgtgcatccagtatgcagaaagggggaaaggagacttgatgatgtgggagaaacttaccacacatgttctttcccatctccattttgaagtatccattgtcaccccattcagctccccacgagttcttgatcagccaatatggagtaccattatcaacaccatatcccacagcaagaacagcatggttcacatcctgtcaatgcaatagaaaatgttaatgtagtattatgtcattgtctcgcatatttagtgaaggtcggaccatatactttgttgatgtcattgatatttaacaaaagaagaaaaagaatatgtgcctcttcattgcagcaaaatcaatcatgtctcagtgccagattagttgggttgggtgggggtatgaatcctctgtgtacactgctcatcagacctttttattccaatactacataatctgtatattaaggcagattaggagtttctaaaagtagagactatttcaatctttcctatcatccagcatctttttttggttgacaaagcatggtatctttcctatcagtattatgacactcgaattgttaaaaatcaataaacacagagagagagagacacacacacacattacgcataacttaaagataattgcagacacccttctcgacgagtaatcaagcactgggttataactaactactgggtacaattctttcccctacggtgagttacatggaaaatgtgcttcttcatcgacaaagaatagcagattaaaagggcaatatctcaaattcatcggaactaaaaactcacctggggagtgttgccacatacggtgctgctgtaaattccacccttgtactgtttgaaaccttttaccacctgataagctacactaaccggtctaataaatgcaatcgcgtattttagttcatcttcagcaccctgtaattataaatgtttaattgtaaggaatccaaccaatgcccattgaccttttcaggtcaaataacgcatattaaaagatccactcaactgaaaatcatcaacaatgaaacactagaactatgaaaggtttttcccgtcggaaaactacaataatcttcctttagtgtgtcaaatacaagaaatgataagcactgatgtaagcagttaaaagctgatccaagacattgctgttccagagtaaagaggtatcctaccttggtaatattaacagaatcaacgactttaacagcaacattttctgacgagaatttgcatacaccagcctttccagcataaggatattcttcttcagtgtcaagaccaccactgtatttaatgtactcaaaagcctgtgatggaagcccgccatggcatccaaagttattaaaagctccagcacagtccaagagctgctgttcagacagagagatgttcttcccaaatgcctgggcatatgctgcctccagagcaccagtagtgctgccaaaacatcatgcgccgactccgtcatttttcaacttcagaaacccgaatagaatggaaaggatatagaatttacatgttgttaagaataagtagtttaggcttaacgcatagttgattaacgattgataggtagaatgccattccaaactgaaaatttaggaacctagtgacatgatcctaactactccttacctgaatgtccagcaagacccgcacttgccctgcttcttcactgggcttactatccctgcttccctccagtctttctgaaatgacacattcggagatcaaaattaggaacaagagctacttttggtaaccaacaattcgttcacttagcacatgctcttctaggcagcggctgaatggaaggcaactgttcctgaacttactactacttttagcttggaaaagaagaaaaagtaaatatatatagatagacaatacacacacacgtttttctaaacacacatatataccaaatttttatttcattcagatacagtggatgcagcagtactctgcacctcttgacttaaaatcctacgtccagcgttgctcctagatgcaacagctatctatgttgtcatctcaagaaattccatcatcttgaaagtaataaaagttaaaacataacaaagtgataaaaatccaatgaaagaagaatgacagcaatattaggctgcaaaatggacaagactaagcatttatgaattttccttttaggagaacatacaagatagaggcacaaagaaagcactgaaagctagatttccaataacaggatttccggttggagtgaatggatgcaaatggtaatgatttttgagaaagtatcataaacaactgcagaaaaagatataatggagttctgattgcaaataccgtctctggtaggttgacattagtgagctgaagatcgctctttgtggtagcggaacagttttgaggagctcctagcctttctctcctaaactcatcccatgttaggtcagtaaactctgccaagaagcatagtcattgtcaagagcaaaatacagcaagcaaaatatgcagtgccttcttgtttctttattttgtttgttcttctcctttaccttgaccttggttttcatatttttattttccctttcttcactcacgtacaagaaatctgctaggagttctaattagaagtaacaaaaacattaatctactacattttgaaccacaaatcaagtttttggcgtcgttgaagtcttaagaaggcatccaccttagcatccgcacctgggcacaacaaggttgagggaacagagggtggacgcgcagcatccaccccagcatccgatgctgagaagatcaagatgaggcggacgcgaagcatccaactcaacattaatccctgaagctgattcgggaaagcaaaaggaaaactttggcccataacttttggacgcaatatataagccaaaaacggctcttttaggtcatcgaacacactttttgaaggggattcgacctagggagagcaaggagccgccgtggaggccgaatttcatcttcttccgccaaacttagtaatttttatgtttctttgtatgatttgttgtttggctaccatgtctatgtggagctaaacttcacgttctaatgttctggttctttcatgactattgttattcgagttgattttcgtttcttgatttatcatattagtttatttattcaatcctgcgcttaattatttgattgcttgatcaccaattaaaactatctacgaatctagaattgaactcgaaagtgtgaattctagattgcatataggattaaatagagcaagttcttgaacctgggtatcggggaacggatttgcggttaggataaacatatatacccgattgccttgcttggttgatttacacgaatttcaaatgcgttcttgttagttctaattccatagacatattggcgttaggttagcttgaatagacgagtaagaactcgagagattcttatgagcaatattaacactgtcaaccaataaactagataaattagttagtcaattcaattgaagaatacaataggaatgttagataactcataaccctagatcgttttcattacactgataatataaaaatcagctcttcctttgttcagagttcattatttattttctttttagtttagttacttttgcatcactacttttgggtttaatccttgtttagataattaacaagtcctcatgggttcgacactctatcttatcactttattacttgacgaccgcatatactatacaagtcaactttatgtatccactctattcagatcatttcatgaactataagtaagaagaaaaaccaaaacgaaaaagggcaaattgtccataaaggcatatattgtccagcctatagctaataggaaaccatatagtatacacaaaggcaattaccattgacaccaagtttgtaggaaagtcgttgcttgttgtgagacctaatcatcttcagattgtccaagtatatctcaaacctttgcttgatctcctcaactgagtcgtatctcttcccataccttttaaagttaacagatatcccaaaaataaataatttttaagtaaaaaggaaaacaaagcttattcattcaaataggaggaaattagatgaatcgaactgacctgcgaacaaagcgaacgaaggagagagcacggcgcgtttggccgatgagttggagaattccattctccagctcctgcaaaccgtcggatactactacttgcctgatcggattatcatcgtcaaacgtcaacgctccgccttgtgcggcggcgattgaggtcgcgatgagtaatagtaatagtataatcgaggcgcgagtcat

SEQ ID NO: 32 - DNA, 3881 bp, Nicotiana tabacum
atgaatcctgaaaagtttactcacaagaccaatgaggcacttgctgaggcacatgaactagctatatcagcagggcatgctcaatttacccccttacatatggcactggccttaatatccgatcacaacggtattttccggcaagctattgtgaatgctgctggtagtgaagaaacagctaattcagttgaaagggtattcaaacaagccatgaagaaaatcccttctcaaacaccagcacctgatcaaatcccacctagcacatcactgattaaggtgctccgacgagctcagtcgttgcaaaagtctcgcagagacacccatttggcagttgatcagttgattttaggccttctagaagattcccaaattggtgatcttttaaaagaagctgggattggtgcagcaagagtgaaatcagaagtagagaaacttaggggaaaagatggcaaaaaggttgaaagtgcttcaggggacactaatttccaagcacttaagacttatggtcgtgatcttgttgaacaagcaggaaaacttgatcctgtgatcggtagggatgaagaaattcgaagagtaattcggattttgtcgaggaggacgaagaataatccggtgcttattggtgagcctggtgttggtaaaacagcagtagttgaagggctagcacaaaggattgttcgaggcgatgtcccgagtaatttgtctgatgttagacttatagcattggatatgggggcattaattgctggagcaaaatatagaggtgaatttgaagagaggttgaaggcagtgttaaaggaagtggaagaagcagaagggaaagtgatcctttttattgatgagattcacttggttttaggtgctggtaggactgaagggtctatggatgctgccaatttgtttaagccaatgcttgctaggggccaattaaggtgcattggtgcaacaactctcgaggagtataggaagtatgtcgaaaaggatgctgcgttcgaaaggcgtttccagcaggtatacgtggctgagcctagtgttcctgacactattagtatccttcgtgggttgaaggagaagtatgaagggcatcatggtgtcaaaattcaagatagagctcttgtggtggcagcccagctttcggctcgatacattacaggtatgtccttttttggattgtcattgtattttatgaattttacctttgatctttaatcgagtaaagatgccactacaggaatatagcaatgtatgtaatgttgaaatgtgatgtgtcacacgtttgtattgtggttgtcaaaacatttcctaaaattttgaggagatagtccctttcctttatgtctatgcaggatggatgtgaatctagttttatacttaatttagctgaatcacgtcccatttgaatgataaagttattttctgcttcattgtgcttttcaaggtgataacctctaacctttggtttgtagtttcagacttataaaagtatgattggtgcgtgctcaccttaattgattggatgggattatgtgtttgctctctattaatacgaattttctttaaagctttttctctcccttgctatggagaattgctactgttgttttgcgtatcatttgccagtttgccataattttgtgcatatagggattactaatctgtgaatttacgttcaggtcgtcatttgccagataaggctattgacctagttgatgaggcttgtgcaaatgtaagagttcaacttgatagtcaacctgaagaaattgataatcttgaaagaaagaggattcagctagaagttgaacttcatgcacttgagaaggaaaaggacaaggctagcaaagctcgactcgttgaagtaagtatacatcccggaaatgctttgacctataattctagaacctgtgtaggaaatgtggacaaataacgtaattactatttcaggtgagaaaagaacttgatgatttgagggacaaactccagcctttgacgatgaggtataagaaagagaaggaaagaattgacgagcttcgcaggctcaaacaaaagcgtgatgaactcacgtatgctttacaagaagctgaaaggagatatgatcttgctagagcagcagatcttaggtatggggctatccaagaagtggaagctgctatagcaaatctcgagagtagcacagatgagagtacaatgttaactgagactgttggacctgatcaaatcgcggaagtagtcagtcggtggactggtattcctgtgtcaaggcttggtcagaatgagaaagacaaattgattggtcttgctaatagattgcaccaaagagtggttgggcaggatgatgcagttagagctgttgctgaggctgtattaaggtctagagctgggttgggaaggccacaacaaccaactggttcattccttttcttgggaccaactggtgttggaaaaactgaacttgctaaggctctcgctgagcagctctttgatgacgacaagttgatggtcagaattgacatgtccgaatacatggaacagcattctgttgccaggttgattggtgctccaccagggtaaggaccctttaactattgataggataaaagaacaaatcatacttttacgagtaaactgtatctgccataatgagattgtggattgcaccttttgtagaactctgtagcctcatatttgtctaggtacttaatagttttacgtctgaagtgatgaatgctgaacatgttatgtgtgtgcagttatgttggacatgaggaaggaggacaactcactgaagctgtgaggaggcgcccttacagtgtagtgctttttgacgaagtggaaaaagctcatcccactgtattcaataccttgctccaagtgctggacgatggacgattaacagatggccagggtcgtaccgttgattttactaatacagtcatcattatgacctcaaatctaggagcagagtatctcttgtcaggattaatgggcaagtgcaccatggagaaggcccgcgatatggtcatgcaggaggtaagctagaacagcctattttctgctaattttctgagcattgtttcctagtttacatctttatttgaggaaggattgttcacatatatctttttgtgacaggtgaggaagcagtttaagcctgagttattgaaccggctagatgagattgtagtgtttgatcctttatcacacgagcagttgaggcaagtatgccgtcaccaactgaaagatgtagcaagccgtttagctgagaggggtatcgccttgggcgttaccgaggccgcgttagatgtcatacttgctcagagttatgaccctgtaagtatcaccatctggtatttcaacctgacatttcatggtgattagactagggtctgagttgagataccaactatgcagatttttgcatttatcttgctgtggcgggttacacttgttttttcagttgctaatttcacttattatggaaaattatttgtagttacattttaggtgatctaacattctaaaaattatcttagaaccgttggcgtatagaagcgaaatacttttgacaattgattgtgctaacttttgttacaattacatcacaggtttatggtgcaagacctattagaaggtggttggagaaaaaagtggtaactgagttatccaagatgctcgtgaaagaggagattgatgagaattctaccgtctacgtcgatgctgcatccagtgggaaagatctaagctaccgagtggagaaaaatggagggcttgtcaatgctgccactgggaaaaaatctgatatattgattcagctccctaatggagtgaggagtgatgctgctcaagcagtgaaaaagatgaagattgaagaaatagtagacgaa

SEQ ID NO: 33 - DNA, 7477 bp, Nicotiana tabacum
tcacttgctttcaggtatgatactaacaaggagacatactatgccagtaacaacagggctcgccacacttgtgccagataatcgtttacaacgtgtgctgattttggatcccataatctcacgcccatatgcaacaatgtctggctttacacgaccataactgtcaaggcacagtacagttaagaatctatggtttgatagacgagtgtaattatttaactgttattagaaaagcaagatcctaaaatattcaaagaaaaagaaagaaaaaaaaatgaagcaaagaaccataattttgaacttaattctttttcaagaaaaaaaagaagcaacaataacaacaccaataacaagcccagtatttttccacaagtggggtctggagagggtgggaagtacgtacccttacccctaccctagaaggacagagagcttgtttccgatagaccctcggctggagaatggatgacaaaaataatggcaacaataaggaataacaacaagataaaaatactgaagccaagaaagcagctaaactctaggtaataatagcaatctatgaataaaaggatatcatactaacactgatgctagcgaactgggaaagacaaagagatacgttcgactacctactagccttctaccctaattctcgacctccacaccctcctatctagggtcatgtcctcagtcaactccagttgcgccatgtgttgtaacctcgccccaagacttcttaggcctgcctctacccctcccgatacccattgtggctaacctctcgcaccttctaactggggtttctatacttctcctcttaacatgcccgaaccatctcaacctcgtctcccgcatcttttcctccaccgaagccactcccaccttatcccgaatgatttcattcttaatacctagtatgcccacacatccatcttaacatcctcatctcaactacttttatcttctggacatgagtgttcttgaccggccgacactctgtgtcatacaacatagttggtctaactacagccttgtagaacttacctttaagtctcatcggcacatttttattacacaagacaccggtagcgagcctccacttcatccatccagctctgatactgtgtgtgacatcctcatcaatctccacattaccttgtattatagatctaaggtacttaaaactacctctcttagggataacttgtgtatcaagcttcacctccatgtccgcttcccgggtaacgttgttgaacttgcactccaagtattccgtcttgatcttgctcaacttgaaacccttagactctagagtctgcctccaaacctccagcctctcattaacaccaccccgactctcgtcaatcagaactatgtcatcagcaaataacatacaccatggcacctctccttgaatgtgttgcgtcaatgcgtccaaaaaaaaaaagaagcaaagagcttaattgtgacttttttctatttcatgtttacggttcatctttcttcctttccttttttccttagaagctgagtggattgtacaagaggcattcaacagatgtcatgctcctattcatccataaagtttttgccattttcacccatcattttccactcagcagaattttactcgaagcatcacaaccatggatagaataaagctcatagaatgctcgtttgtttcacaagagctgatttttaaaggcatcttttttaaatgaagttggtacatccaacacactcattgacttcctatgtggtcatatagtagaacacaactttaatacagagaaggagagggcagaaaaataaagaatacagactatactccattgcaaagagtaatacatagcaaagaaaggagaaagagatacccatgaggaatctcccaggtactcattccacgtgaagaaaatgaggctaaatgattactttgatcaatggcaccaacaccaataacatcactttgatcagcaggattgttaagagtaccataaagtggtccatcatttccaatagcagaaaccatgataatattgttggcagtaagctcccaaacctagcggaaaatattgattacgtccatcaatataaagcaactatgaggagagactccagagagtaaaggtgttaagacaagtagaaataagactgaatatatgcatgctaagtttagcaagcatgagaagagtgaagttgaggtaagattagataagattcccatacctaaaatgcacacaattcagatatctagactcattttccatgaaattagtatgatccgtgaagatatcacatcaaatttgaatagaattggttgtaatggaggtgcgctacagagggttatgtgataagaggatacctatcaaagttaaagacaagtttatattggggtaaatgtttggctttgtattaaagatatgagcatcaccaaaatgcatatgcaagatgggtattataaaagtttcacaagataagaaatgatcaaatttgacagaacataaaggataaaataagaatgtcgtttgagatggtctcatcatgtcctaaataaatctccaaaggcactggtccttagatggaaaccatgatgattggaggtgctaaaagagatgtatacctaaaatcacatggaaggaagttgtcccaaaagacttataatctcgttgaattcatacagactcaaaacagaacacaacagaagcaaaagtctgttatacgcgatatcgactattaagaatcaaggtgtagtcatgctagtgcacttactttaggtccaatgtctactaggaatctttttagtctgtctgcacttctgaagtttgtatgtcagtagaaaaagaacctccagatttatagatatccaaactactgaatctttgatgactccaaatggagcagaatggatggtgaggattcattagccaacccaactagcttggaattaaggagtaattattcgtgttgttgtacatctcatcaatataaaggtgaaaagttctgctaatgttgtttcaggtcctgctgaaagtaatgttaatttcagtgaaatgacaggcttaaacaactccgaatctcttttacaaaattgagtactagatataatatacaacccttgtgtttaagacatccatgacatagttcagcttgcaaaattaatagatctcatgaaacaaacgccccattaagctcaagaaagccaagtaaaatccatgcactgcataagaaatataagattacatgctgccaattataatcaaacttctaatacttccgagaccacatattatacagaaacttagacaataaggggttatggaacaacagcaagatcatttcaatgcctatgctgtagacaaaatgcaatccagtatcataccacataaaaacaataaagatataaaccaatagataagtgacctcaccttttccacaaaagggagatccaaataatcaggtccacctatgctcaaattcagaacatccatgttggttgcaattgcgtaattaaatgcatcgagaaaccacgatgtgtaagagacctgcaataaactgaagagccacttcttataatgctaaattggtcattacaagattgatctttttatttctaacttttttataggtcgcctagcgttgtccttgtctgtaacagtagctttagtacatgagttagtgttatttatgtattttcgtattccttgacttatgtgattacttgtcgttgctttcgttccggccttctaattgcaatactcagttttagttttgttcctttgtattttttgcttcggttttctaattggtgtgcttgttgctgctcttccttttatctttcctaaaccaagggtcttccggaaataacctctgccttcttgaaggtaggggtaaggtctgtgtatgtactaccctccctagaccccacttgtgggattacactgggtctgttgttgttgttgttgataatgatggtgtcaaagcaaaacttgtctcgactattccaaggatacctgcaacctcccactagcacaggtaccgggtatctcaacccaccaaggcttaggcagatgggtagatatcacctagcattttttatctaggcaaggatttgaaccatagtctccaaaattttaacccacttcattgaacgctacccaacacccttgggtgctacaagattgttcctttttgtgtgaatagactctctttcaaaccccaacatcaaggattcaaacccatcgaacccatgatgtgcgtctaactcacacatcacttgttgcgctcttaccactacaccaaagccctgggggtgaatactccatatcatcttgattgtccttacttgcggatatggtttgtagctactgaaatcaatagattgcacaaagccaatgataggtagcttaattggaaaaactgaggtccaagaacgataaggtcttggcctcaaaatctccatgaaaggaaaatagtatttaatgtgtgccttatgtaagtaattttgttttccaatttactattagcaacactgttacttgttatagtatctcaaacagcgcatacagtttttataatatttcaaactgcttatacctccccaatagtgggctaatactaagtatgggcttccttgaaaacaaaataggaattatagattgcacataattcgcagacaagttcctggcttttctaaaacataaaagtaaacaatgtcctccctccccaatcccctgaaaaatagttgcaatcttatcactaaagtcataataagatggcagaagaaatattatatgttcaataacatagcatgtaacatggactccaccactaaatccaatcagtgggtttggccgctggaaagggtatgagaaaactgtgtatatttaggtgcatattcttccaagatattgtagcttaatgatgagaagttaaagctagcacaaaataaggtgcagaagcagaacttgtcatttacagagactaggcagtctaaagtattttttcttccattccagaggacttttcactaaaaactatgactgcaagaatttgctatattaggttcaccactcatgaggtggatgtggcacactctactagcagaaaactggaagggaacgggggaaggatcttaacacatcaagtatttgctttgctgcaattaacaacgaaaggaccgtttgatcataggaatcatcattagcactcagcaagaagcagacttgtataaaacatcagtacaataaattagaggcaataatccaagacatcagattgttgaagatcttcaagtctcagcttacttaaacagtttaagaaaataaagccccgtcaccccccaaagaaaaggaattggaatactcgttcaaaacaatccattacctgtgcatctgtaaatacatggaaagcatagatttccgcatctggagcaaaaccgaggcattcttcatcctgaccagcaataacaccagctacaaatgtcccgtgtccaacattgtcattcaatgtatcttcgttggtccaatttgtgcgttcctgaaatttaaggtaccaagcccactgtctgttattaatgacgtaaagatggtacgaagatatatacattggcatatatgtaaatgtcaagcctcaaaccacattggattcaactaaagcatttctttgttacagaaaatatatttttaaacgacaaaagacaagataccttgatattacgaaaatgtgggtgatctgcacggatgcctgtatcaaaaattgccattttgaccttagcaccagtatgcccttttgaccaaagctcatgtgccccaaagagggatgtgactcgagatttctgcaaaataatcatacaggacagactgtatatcaagaaaaatacagcgaacaacaacaatatgttcaatctaaaaaagaaatagaaaatagagcagcaacatgagacccagacactcaaagaatgcagaccatgtttttcaaaaaggaagtatgccctgacaaccttgaggaaataagaatgacaaattataaacctattaacactctccgatctgaatgttacgctccaacggccaaccaagttaaagtgagccacttaatgatctaaggatatataatccattctcgttagaggtactttagtgtcttgaaagactaaaaaaacaaaacatggtcatatatccagtgcaaaagagaatattggggcatagcagagacaacttgtgaaattatatggatcacagggtcgcacaaagattaaactttatagtgatcagtaaggtgcagcttctgtgtaataatcaagtttcccttcatattgcgttgaattcagtgtgtcatgaaagatataaaagaatattatcaattgtaacttcgtcacagagaagataatctcagaagtcattttcacaagttcgtgaagtcgaatgcttagattgtagatatatccacgagttcttcactagtccctgaattagtcacatatgtaacaagcactagaaagggactgttagatagttacgggaaaatagctaaatgtaaatacttatatttattataagtgtcccacttcgggaaaacacaggtatagatattattacattgtcaagtgtgcccataaaaggaatcagttgtaagatattagtcttcaagcattctctaatctttctcttatttttctcactatggagtctcagcatcatgacatattaatggaataacagacacttgattagaccaaaataggaaaaggacaaagacaaaagggaactgaaagagattaatttcctttgaacatataccatgcaataaagttgcaactatcatatgtcatgaatgcaaagagaagagttgcatacattccaatgatgtaaattatcagtaaacgcatacaaaataaaacacaaataatcagtggtcttgcctgcatcaatagatgtctgctccagctaattctcattatactagtgttggccaccgcatagttttgaccttcactgaaggacatagcagtaaaaatctttcctggcctcttcttcccattggcaaaagccccattcttctcactcttctcttcaagaactatcctttgatagctcaaatccaacgaaacgtcttttacaagattcatttttctgaacttttctagcaagagttctttcattgactcgtcgatttccaccaatccaaagtcagtaggaaatctcgcagccggatttttccgctcaatccattgccaacccttaaatttcaagttgttttgaagataattccagtgatcctcaggttccttataatgatagaatcgaacaatataatttctgctatcagattgttgcttctggtcatgttggcactcatcggagctactagaaattaatggctcagactctattggtgggttgaagcggatgagtgtatataccggaaggaaggggacaagtgagagggtgaagaatgatttcttaggagcttcaggcat

SEQ ID NO: 34 - DNA, 6761 bp, Nicotiana tabacum
  misc_feature (3765)..(3765): n is a, c, g, or t
tcatattgaagcgaccaagtcttcagtctcagtcgtctgctgagaaagggtgcctccaatccacctcttgagcatctctaaggcaactttaggttgatccattggaaccatgtgtccagcatcgtgaacctgttataagacaccaaaacagttagctcaaacatccatcagtagaatttgaacaataacatcgacaaagaaaggcaccttcaggaaactcagaggcccatggcttttcaacaatccagcttcagaactgtcaacttcaaaaggaacatcgggagatgctacaaactctttctgaccactccattccatagcctgaacccatcttgagttacctggtaaaagagaggcgttataatatccgaaatatttatgtgaaaagtttccatcattaggcttagagttgagtcaaagcttaccaagccagttgcaaataagatcatattctccagcataaacaagcaactttattccatcctcgagcaaggttggaatgccagcctcaagattcctcatccaatcaacaagcatggcctggtacacagtagtgctgcatgagacaaactctatatcctcaactccaagagcctgcttaacagagtgcatattcagcaatttctccatgtttgagaagtcatagcagagtgctccaacgcatttctttctgatgtcgtaatgctgcaggtgaaagctcaatggatcagaaatatggttaatcagtcatttgttccaaactttggaaggcatgccaatgacaatgtgacctcttgagtaatttaacatattcaacatgaaatgatatggagtagcgatttagaagaaatagatttctgggatcatttctactctttctgaggctagtaacacctatttctctacgaagtacagaataagtgtaataggcactagaattagtagaaaacgggaaacagacagaaagggctgataacttacattgatgtcagccccagcacgtgcacgaacagcagagaatatagaattgcaaacaaaataggcagccaagcaagagattttcccatcagtacctaaaagaataaaaaagacagagaaactgagaagcaaaacaaagtacagagaattgatttgctgtggtcaaagaacatccatttacttcatcagctccttccccttttctttttcacccagggaaagcccgaatgagtcaaatgatatggaggaaagaaagatagtaaacagtaaattaaataatgtaccacaaaggtttattgcaacttcacaaactggaagtattttgttgatacgatcatgatcagactttgaaattaatcccatgtccaatgcatagtcagtatacgcagcgtattgtattttgggatctgtaagcccattcccaatggcaaatccctgttcaaatactttcaatgaagtaaagacacatgattaaggaaataagaattcaataactgggaaaatgaggtacctttaagtttatatgtattccttctttagccttgtttcccttgtgtactctagcagcaaaagcaggaatatagtgcccagcatatgattctccagttatgtagaagtcattctttacaagctcaggatgctcttcaaagaaagcctacaccattattaatgatcataccaacacaaacaagtcaggatcatattatctctgttacgcatcaatttagaaaaatgctaactgtgtcacataaaagaacgaatctgaaatagccaatgtgtcacaaatgctcaagagaattcataccacattcggccttcagaatttgcaaagcagaaaaatacaacaataaaagcaacatataacaatatttccaactagaaatctgttgaaaaattcacgttccgaataggtaatgtatagtcttaaggcggctaagccaagttctgctaaatattctggtttaaaagctgttatacatgctaacaaaatgcatcatgagggaaacaactgaccaacaagttacccagccaaaattcagggatcagctgcagtttgtagtaaaaaacaggaaaaccagcccatgaagaagggtattgaatactgcaaaaaggttgagggacagggttttctagcaatgtgatcacatcttttgcccctaatgcatttggcagataaatggagtcaaaatattttaacgcctccatttttgttgggatcagaacccaggcatcaaccaactatcatttcataagcacaatataagactcaagtcctagtatatgacatctctccaattatctatatggtaaaagtattaagtgaccatgtttcttttgacaagagtgggttgctctagtggtgagcaccctccacttccaaccaagaggttgtgagttcgagtcaccccaagagcaaggtggggagttcttggagggagggagcctagggtctatcggaaacagcctctctaccccagggtaggggtaaggtctgcgtacacactaccctctcctgaccccactagtgggattatactgggttgttgttgttgttcttgttgtttctgtaaggctcgagttctagcattagaaatcagccttttgagctcctgtagacctattgtactgtaccccgtctttgtatcacatgtacacaggtgatcaacacacagacaagagaactgacaagcaaaccgcactctgagagtccgagcaattacttgaaagggatcccagacaacccttactggcaccagtactttaatttgtcaccactcaccaggcggccaattctagacaggtcagcaaggcgataaacagaggtgtcttaatcatcacaatatcatcccgcacacaggagtggggatcagcaaacacttcttttataactgagaaactattgtttccagcattgaaactgtggataatgagcctgcccctgtactttcttcaatttttttcagaacaggattcaaactactgacatgcgcctaccacacatcccatgttcgaaattgaaaccaaagctctggggcactggagattagcaaataggctaggtgattataaagatatcattcaagagttctcctactaattcacggtactttctacaaacccctccctccttccacagttgatcacaataagcttgactactgacgtatatgtcaataccacagcctctgtgagatagaaaagcttccataatgactacttgaaaggagaccaagggggtttagaaagtatttatcattctgtaagctactgcaacaataatgattttacttaacggaaaggaatgccataaatgaatttgtattcttgaggatgttcacaaccaggactgaagttgcttccacccctagctacattctttatccgtattaaggaaaagtttaccatcctttttttccaggtgaaatgttttattggcctttagaagcaggacaaattgtccagtgcaagcctcatgaataacatacatgaaactaggaattgataggtgaagaaaatataggaaaccatccatatcattaagttaaacaattgactctctgtcatcatacgacaatgattacaacggttgattccagaggaataaatatggttccaagttgctttaggggtttaatttcacacagaacaaacctgtaggaagtcatacaagtcgtcgctaacacctgcttcactgtgacggatgtcatgtctgtcagaactgtaactaaagccagtacctgtaggttggtccacatagataaggtttgatacctgcagaaataacacgtcaacatcatttcttcaggncgtcaacatcatttctctaggtttggaaaatctattaaggtattctagtgtccttgtaggagaaaaaggaaaatcgataataaaaatgaaacatctactttacaaggaacaaatgtggaacacaaggcaaacttgacactctaggagtcagcaataaaagacccaaaccacaaaaaccaaaactcaagatcttatggaacataaagcactttcctctctgcattcttgaattgccgtgcaggtaatttttttcagtaatgagaaaaaagaacattaaaacaggcagaagcatgacatggaattagggaagtgcagtatcagaggtctaatgaaaaaaatatggctgacatgtttcctatgcaaagcattaagatttcagtaaaacacaaagctccttccgggaaaaaaagttttcttgcagtctggttgatgataactacataaatgctgaaagtgtaactatctaaaggctaaaaaggacatttctcctgacagatgtatcatgtgcaagaaagaaatggtccccacagattttcttcacattgatgaagtatcaatttgtgcctgtgaattggcattgcattcatttcaggttggttactggtacatctcgaagaaggataatggtgaagcttggattatcaaagcttaatcacaaaccagtatccttatacttatgattcttcgattttacacaacattgaactagatatagacatgttattaactgttttatcttgatttccttttcaagtaatcttttcaaaactaaaaatgataataacaaagaggaacatccacaacgaacaagctttttcgctaattggcactttacaaataaattagcaggctgcaaaactacttatcatgaaaacgactggataaaggacatgcaaaagatgttgccaatgcaaaatctaataatctatacgcccatgcaccattatactcttaactttcatgtaccattgagtaaaagcaagagaaagtcttatactatcgagctgaatcatctactaaagagcaaagaaggtaaattgctactattgcttaagcaaagctgtgtttacataccacaataaactgctgttaaatagcataaaccattaagactataaggtggtcttaaagatagtcaattaccttgtcccacccatattcattccgcacaagtgacaaattatttgaaatagagaaaggtccattttcatagaaaagggccaactcactgctgcaaccaggccctccactcaaccagatgacaacaggatcgtccttactaccgcgtgattcaaagaagaaatagaacaacctacaaaatgaaagataacacagtttcaagctaaataagagcccaaccaacaataagaagaagctagttgatacgttagacaggaagacgaagatataaagccttattactccggagatgtatattttggtaaatgctcacgaaagacaaatatttaaatgaaacaatgttgcagcattcctttcaattcttacaactgatttggaaacttcttaagcgcactgattgagttaaacagataagtggtcaaactgtaacaatctgatggttccccacaaaagctacatgtaatgacatttgaaggtaaataaatcaagcagacagaatatttctccattaatcaaccaatcaaataattccaaattaattgggttgactaaatgaatactctttaacaattctgctatatttaaatccaatttgttgcaatattaaataaatatcctttgaattcatttccacaccagttacaaccgttttattcgaatttccgaagtggaaagtgaatttgtaggaggatagaggggaatgcaggggtgcactgcacgatagaagactactgagaacttggctacattttgtagacaacaaaaacctattaccccagtacaccacaatgcaatgctgaatccgacagtattttaacataaaagagaaaagaaaaaattgaaactataatttggttggatgcctatgataatgcaaatcggaacaagaatcaccaaaaaccaggaagtgtttgaagcaacaaatatggtactagtctgttccaatttgataaactttctatttttgggacgtccgggaacatttgacaccagtttgctagtatcttaacaattttcaagatactctaattcatttctttgaaaagaatagacattaggcctaactcaacatcaaaagctagctcatgaggtgattgattgttcattcaatatataaggagacaacagtccactcactccaccaatttgggacactttaatatttccacacgacgaggccgtggacaactggagtgtggacagcataacttgcgaccccaacatggagaaacacaatgtcgaccttaccctaccacaacctcaaaaactagctcacgaggtgaggaacggaggattgcttgataccataggagacaacactccattccctcaaccaatgtgacacttcaacattatgtgttatttttatcgagttacattttctacagttatcgaaatatgtttcttacaatactacatcgtacatactctaataattaaatcaaatcaacatcttaaattccgtgttcaactaaacactaccataaaaatcgagacagagattgaaaaaaaaacttaacctagggtttgaaaaggtacctagcagcatgagaatgcttaatcttataataaccggcatgatgccccaaatcttcaaaggatataacactcgaattcgtcaaattagcgaaattaaatcgcttctcgacgattctagaagcagcggtgggaaatggatcccgatcgacaatgttatcggattctttcgggaacaaatttagctcgtgtatcaacttctcagcttgcttcgatgctaacttcgaagatattgaaaccttcgcgaatgaagaaggagaaaaagcaaggagaagaacaagagagagaaaaagggaaagtgaaagcttcatttgcgccat

SEQ ID NO: 35 - DNA, 2780 bp, Nicotiana tabacum
tcaagaagaaggggtcttctttccctcatttccgaaggttccaataggtttggcaagaatgtgctgcattgctttgactcctagtggattgttcttgctctgtaccaacaacatttaaaacacaatcacgtaagtaaatgaaacaaccatatccttctgaacaaaactgttaaaagataaaccttggcctaactaaagggcagcacggggcactaagctcccgctatgcgcggagtccggagaagggccggactacaaggacctattgtacgcaaacttaccctgcatttttgcaagagaatgtttctaaagctcgaacatatgatagctactttaccagttaaaccttggcctaactcaaacaaaaatctagctcatgagatgagaattgccaaagaacccattcccttaatcaatgtgcgacaatctaacaataacaagcagagatcacttacaattgagcaggtgcctgctttaacattgcagacaggataatcatgtgggcaacaactgttatggtctttacagcaagtagctccttccatgggacaacaaccccaagcaaaacagtagttataatacttgtagacacagcagcacgttgttccggctgggcattcgttataatcatcacattgagtgggtggcttgactggtgatggaggagatggagctggttttggggggttttggcctgtctttacagggtaagaagcaattgtagcaataccacacaaacctttggggttgccaatgtttcgctgcatcctgaggtaaccattttctccccacgaagcaccccatgagttcctcacgatccaataatccatgccattttcactaccatatcctactgcaaccacaccatggtccactgctgcaccacattttccggtaaagataccctggagcataggcggatccaagatttaaacttaataggatcaacatttaaattttttaatactgaactcattgtgactttgaaaatacagaaatatttgttgaatccgtgtaaatactggctaattcgatcaaaaagataacaactttattgacaataggcaaatctgaagtaataccgatttatagtgctggaagtctttgccgccagcttcgatagcaacgctgacgggttgacccgcgacggcctttttcagtgccttttcatcattagcaggaacatcttcatacccgtcgatggtgacaaccttggcatttttctataattgtttcaaacaaaatattaatagtcataacttgtatttagttcatttccaataatcccttttaagacagagaacaccatactgacccttgcttgatcgcattttccatctttggctttgtaggggtagtcttcttcagtgtctattcctccattttgaatgacgaatttaaaggcatcgtccattagacccccttggcagccttggttatcggcagtatcacaatctaccagctcttgttcagataacgagatcagattacctgtcattatcttgtttactgcttcaattgaagcaactgctgagaaagcccagcaactccctatttcatttcccaattgtaacacaattaagacgaaaatcattagttgctttacgtaatataaaaatatcattatttcttcagcatttatttatgcataaaatggaagataatccaatcaatcaaggctgcataatttgccaaaacaattgcacaaaaatacatactgatgaacatagtgttttgttcaagggaaaaaacattacttatattgccataattagatgcggaaattggagcaaaagtcctgctaacctaatttatcatacttaacaacaacaataacaaatccactgaaatcccatcgtgtggaatctccttaccccatctagataaagtatagagacactttctgacagaccccaaaagatacaaaggtaaagaggaaaaaaggcccacgaaaggtaaaaagcagggaattaaataacaataaacagcaataccaacaaagcaatcagaaaatttaaaaattaaacatgcttaaccttagctaaaattaacaataatgaagggtcaactgaacttgccattgatcttaggttaaaacttatgacactgtgatcatttgaatcccttaccctagcaaactactaaattttccgaatttccatcaaagccatcagtaaagaaagcattgacaaatgttaaacagaaaataagtattaacaaaaaggaaaacaaaaacaagtaagaggtgcagagatgaagaaggcagagtacgaaaggaaaataccacattgtccttgatttttgacgtcaacaagaacacctttcttcctccagtcaacggaatccggcaaactatctccgaccttgggggcataacggtcactttgggtatacgacaacctactacgaccatcgggcttagtacccaagtagatggacttgtactcctcgttggtcaaatctgcaaactgagtcaaacccagcttgtaacttttttcaggcgcagagttctgttcatcgatgtatctaaggttgtccttaaagatctggaaccgcttgtccttttctcctaaggcgttatacacttttttatgttcaactagccaagattcatacaaagacacgatttcatcgtctgttcgccagaccgttgactcgccgttcgtgtgatgtttttcgttgtagcttataatggacatgtcctccgccgatgatgttacggcggagaacatgagcattacgagtatggagatggagagggtggaagtatgaatcgccat

SEQ ID NO: 36 - DNA, 3175 bp, Nicotiana tabacum
tcaggaaggcgaaacagcaagaggattcaacaaagtgcccacgaacaaaacaacaccagcagtctcatctttcacaaggaacatgaagggatgatcagcaacaaagtctatctcctcttcaaccttcatcatcgagcacccgaacatcattgtagcaacagtaacagctggagctactggagcctcctcatttacttcgataaaggccttgtgaaaagcttttgcagctggagcttctgcaccttcctcatttacttcaataaaggccttgtgaaaaacgtttgcaactgccagaggataattctcgcccaccatctcagtgagaccacctttaaaaggtaatgtgagctcgagtccttttagaacttctaaagcttcaatccccaaagatattttgaacttagggataagaaactcgtgcactttaactttttcatatggaacatggcgatccaaaaatccaggttccgaactaattttctccagtaaagttggtaatccatcacgggcatttgggagatacacatacatgttgagaaatcgcttgtcctcgccctgtttataacgaagccttaacacttggaaaccatcaaaggccttcacgtattgcctttttttgctggtcattaagggtgcttgaacagatcctccattaaggagatggaactcatggtcttttgtatctgaagcattcaacttttcagtccatgctcctttgaaatatagtgcattcgctaagatcagacttgtaccgctattgactgcaacaggaggaagaatttgtttgataagaccattcgttttctcttcagcccacttattgacttcaccagtaacctcatcaccctacataagaaaaattaaaacaaacagagaacatagaatcagcaggctagtaacaggatagagttgaaagtaaaagaaacaaaaaagatgtcctatatgacattagattcgtttgtttgtaatcttattcgaaaagcataataaacgtttctaatgtgcttactaatttgaaaatattctgtttaccaacatgcccataatattttgttatacattataatactccctttgtttcgtacttcgagggtcaaacttttcaattttaaccgtgaattcgaacatgaaattttaatttttgacataaaagtcacatatttagagactgtaaaagtaatataagtcatttataaggaatataagaaaaatcgcagtcaagaaaaactcgactctcgaaatccaaaaggtgtcacataaattgggatggagggagtatcatgtaatttcaaacatcaatttcttttctagtgagtgaaggattaagactaaccttgttccgaaaatcaacagaagccgaagcagccttataaacattgtccataacctgtttgaaagaatgcttaaaagacaaagattggtcaacccaggcccaattagtgacagacaaacgaggacctcccatggggctgccatcggctaagacgtcggtgatgacccgagaataaacagagttaagttcttcaacagagttgaatttgagaaaagccaacagttgatccaatgtggaaccactggagcctgctgcaataagagcaaaaattatttgaatggagaccggggaaaacaccatgtttgcgttgttggactcgtcctcgtcggctttaaacttgctgaagaatacatgctttgaaagaatcaatggaacatccatcatttctgatgagggaaactaaaattgaaacagagaacgtaaatccataagatgagggagactgaaactgaaacggagaacagaaatccataatttctgatgaggggaactgaaactgaaactgaaacggagaacggaaatccataatttctgacgagggaaactaaggtaccttcacagttgaacttgacagcatggagagaatgctgatgcatatagaactaacagtcatggtaggcgaccacgagtcatacagaatatctgcaagacagaaaatagttgtcaactgctgcttttattagatgcattctaacttttttcatgagtccggtagaaaatcttaattattaaaaaaaaaaacttattctggaagatgagaggaataactgtgaatgaaaggcgttttgctttcactttattaggcaggtaactatagaaagtttaagagattaataagcaagccataggcatagagcagaaaccaaaattatgcaggaaaagaaactagtatgatctctgcaattcttagatgaaatgacaaatttgacgagacccacagacaaacaaaaaacagatccaaagtttattctactagggctaagagttctgaatcagtaaacaactgtgttttttaatcatccgtcaaccatcattgactattactccataattagatacgaatcaacaaatattatcgggacatgaaaggggaaaagaatcaataacaaaaacaccaagaccaagtaaaaagctcacggatatagcgagacaatctaccatcatacccatcatcaactaagttggcatagagcatttccaaaactataatacctgtcatctaatctttattaagagttcatatcacaaatcatccataattgccaaggattttcgttaaatgcttcatctaatgcattctaaatcaagccattaagctcgaagagtaaccaaataaataaatttctgttggtgataagaaatagaggagacttgagctgttgaataaatacctaaacaaatgtgcccgtccctatagatatcagggtgcaaaggagctggaggcaaaaatatcacctgcatcaatgtagtcagccctaattagtatgataggaatttcaatcaagaactttaacaagaaaccacatcttatatccacctggggagctttaataggataatgttcagggaattcggcttgaagctgataagtttcattagcatacagcgtcccaggagcaccattcacttcaattaaccaccttttcaaaaatcaaaagttcagtaataatagcatgggacttcgaattcaatattagaaatttattggaaaacgacaaaaaacttaacaacaaacaggaaaaatgaagacctttgaagataatcggagggttcaagattgaagccagacgggggattgacctgccagttccctagctctgtatggagtcgattgcatgccat

SEQ ID NO: 37 - DNA, 5038 bp, Nicotiana tabacum
ctgaaagttggttcctttttttcttctcttatttattcatgcaataaagcatctccaaacttctattcttattcattctctctgctttcttgcttcatcgaactggtgagtagttgttttgtttcctttttcttctatttaagaaaaaattaactctctttttgtcgatatattttatcctttttttttcttttttctttttttgtttctgtgggtattagaggttttgtgcttcatttcatatatttgtctcatgattttactactttcaaggttgggctttttccttagcaagaaagaactatttctgtttatgtttcatttttcttttggaccttggttttctgttctcgaggattgtatctgttaaaaattgaagtacttttttttcccttcatctttttaattgatgttctgtttagtgttattttcaccttttatggcatttagcaatgtttgtgctttgacgggttgctgttataaacataaattttgggaaaataattaccaggtaaacttgttattatgcaagtgcaatttgtgtgcgtgtggtggttttgttgctagggagcaaggcatgtgattagtgataagagggttaaaaggggagtagataaacaaagctccactttttaggctattgtttttacttgggttcttccattttttattatagcttgatgaagtaatatgtagcttataaatttcccagaataagaatcatctcttgccttagaaaaaataatttaccagtaagagcagaatatatggtaggattcatccactcaactccaattagtttgtgactgaggcaaagttgattgagtgatcgattgagtttagtctcattagattgtcatttatccattaaaaacatgcagcaggcataacatgagtgatttgatcttctgagcattttctcttgtttgttgaatttaatatatcttcactaattgcttggcctaaattttattaactcaaagtgatgatttgcctaggtcaatatgggagcaaaagcttttcttgtcaccattttactctcatcgctgttatttcctttggccttgtctacgtcaaatgatggcttggttagaattggactgaaaaagataaaatttgatcaaaacaatcgacttgctgcacgcgtcgagtccaaggagggcgaggctgtgagagcctctattaggaagtataataacttccatggtaatcttggggcctctgaggatacagacattgtagcactgaagaactatatggatgctcagtactttggggagattggtataggctctccccctcagaagttcacagtcatctttgatactggtagctctaatttgtgggtgccttcatcaaagtgctacttctcagtaagttatttttttccttaaaagaatgcataatagagaaagctagtattggctacataatttgatgatcatcaatatttatgtttctctatgtttgtgcaggttccctgttttttccattccaagtataagtcaagccaatcaagcacttataagaaaaatggtctgtttctgacctttgtctatatttgataattgcaacacgacacgtgcttttctcttatacttgttatttatgctcaatgcttgcttgtaagagaaagcgttccattattggcattatacatgacatgtcttaggttttgagatcaaaactattaactctgctaccaacttaggatttttttaaaaagaaaataaaggaaaccctcaccatttttattgttgtcatccaattatgtgccttgtatcaaagttttttgttgaaaaatataatttggcaagtttatgttgttggctttccctgccaaaaatgtgctaatgttatctctctgattttttttactcatgatttgcaataaaagcttgtgccttttaaactgttttgtctatcaaggaatctgttatgctggagttcctttattgagttttgatatctatcataatttactttcctggaaaattgatgtctgctgtgtgtttgatatgacctttgaatattcttctctgtcgttgagttggtcaacgtgttcaattggttgttgacctaagaacctgttcatccaaacctttttctgtttaatatgccatacagggaagtctgctgcaattcgttatggtactggagcaatatctggatttttcagtcaagatagcgttaaagtcggtgaccttattgtgcaaaatcaggtgaatgtggcttctcacttccttttttttaatttttttttatgtttcttgaatatatggtctctcatctgtcgagattgttaatgacatcaggagttcattgaggcaacaagagaacccagtgtgacttttttggtagccaagtttgatggtatattgggtcttggtttccaggagatttctgttggaaatgctgttccagtatggtatgtgggtttattttgtttgcgttctcttctttccaaatgtttcttcaatttcctattaaccaagtgcgtgccttgtgaatttcattattattgaaatgattttatcttctggattgcagaatttcatgaacattttcttctatataaagttttaagtgataccggtcttgacggtttcttctgtgttttataggtacaacatggtcaaacagggtcttgtcaaggagcctgtcttctcattttggctcaaccgaaatacaaaggaagacgaagggggcgaaattgtgtttggtggggttgatcctaaccactataagggaaagcacacctatgtcccagtcacacggaaaggttattggcaggtaaatatccctatatcttcggaagattgatgttttgctttctgcaactgttttcttactcttcagaatataatatgcagtttgacatgggtgatgttctgattgatggtcaagctactggtatgttacgttacttccttttctatttttttgtgtgtggagatttcgaggatattgatgagagcactttcccatgatttccctgctttttcgttgtattgacatactgaataatgtaggttactgtgacaatggatgttctgcaatagcggattctgggacttctctcttggctggtccaacggtattctccaaagcatattccactttttgtccctattattcagctattttcaatagtgaactagctcagaatattttttgtaccttcttgttcatgtgtagcttcaacaatcttcgagcgatgaataggtttagtttttggttggaatatcagttaaataataatcagccattcctttgaacttttctcgttttttccttttcctattcaaaaaaaggacgacgggaagtgcagtggaattgatgttcatcccagtatcaggacaaactaccttgttgattgtcatacctaagaaatgtttttttttaacttttgcctgttgtttctgtcttattaaattaatgcaacttgagaactgcttctttcttctcatctttaaggcatggttgacaaatatgatacaaggaaaaagctgcagctttatttgtctagacaattgcagtagtgaaatgctttactactacattttctagttctcatcactgtatccttcctcctctatcttgcagactgttatcactatgattaatcatgccattggcgcctcgggggttgtaagccaacaatgcaaagctgttgttgaacagtatggacaaacaataatggatatgcttttagcggaggtgagcaattaattattttagttgatagtttgtttttgtttttaccaatagttttccgtggtatctgcaaagagggtggtttcgtgctactagttgccttcccaatattctgatggattggcgtcttaacaggcacatccaaagaagatctgctcgcaggttgggttatgcacctttgatggaactcgtggcattaggttaggctaatcatttctttcctaaccttggccaatcatttgatatgttaaatcctattataaaatgtgtgctgagtggatttatgtcctccacgtgtagtatgggcattgagagtgttgtagatgagaatgctggcaaatcttcaggactgcatgatgctatgtgctccgcttgtgaaatggcggttgtctggatgcagaaccaacttagacagaaccagacccaagaacgcatcttgaactatgtgaatgaggtaaatagcatcagtcacatgctttctcttctcatcttaggttagattactgaccatctttaacagctttgcgagcgactaccaagcccaatgggacaatctgctgttgattgtggaaaactttctggcatgcctagtgtttccttcacaattggtggcagaacatttgacctctctcctgaggaggtatgtctgatatcaatcttctgtagtatacatggtgtcttctcaacttgtaaatggcttttgattcttctgaacgacgtggttggttgtagaatccttttgtcatgtttcagtttggcagttcaattctttttggttttcactagattagctagcaaggtgttacgctgctttcaagagaagtacacttgtcttgtagaaaatttcaaccatgacagctaagtgtagtttggataattaatgatattgaatgtgtcgagcttcaatatcagtttctttgcttgataagttaacttatgattggataattaatgtcattgaagtgtgtcgagctttgatatcagtttctttgcttggtaagttcatatgattgtactaagcttgcatgcttgtcttgtcaccagtacatactcaaggtgggcgagggtcctgctgcacaatgtattagtggcttcattgccttggatgttcctccaccccgtggacctctctggtatgttttcttttcgtcttaacacacgtgcagattctgttattctagaaaagttataccagctcccttttgataatgctgtttgcttatggctttggtggtgcaggatcttgggggatgttttcatgggtcgatatcacaccgtctttgattttggcaaacttagagttggatttgcagaagcagct

SEQ ID NO: 38 - DNA, 5538 bp, Nicotiana tabacum
tcatatggctgcaggtcttccatctttcctaggatcacttaccgccacaagcatcccatgaaaaaccccgtttttatattctttcccgctccttcttcccaactttaaatgagaatttggaaggttttgaacaattagctgacagatggctcctccgttatgtgcttcgagttgatgacccctctcttccaagaaatgctttttctcatccgatagctcaatgtgatcgccatcgatgcatgtccagttctcatacagaactacattcggaattagctgcaaaaagaggaacacgaatcaatactcggggtttcagaattcgtccgtatcaagaaatacgtgaattgctcagtagtgcttcgccactacgctagctggcggaaatagcttaatggtagagcatagcctttccaaggctgaggttgagggttcaagtccctccgctcctggcttcgtcgtttagtggtaacaagttccgtgcataagccactttagagataggtgatccttaaaaatactccctctgttccactttatgtgagccttttcggagcacgaggttcaaattgaccaattttccttgtggattgagacatagaattttcaaaaattactacataaaaagtactataagtcatactaatagttaacaattcaaaataagaaaactttgtctgactccctaaatagtaatagattcacataaagtggaacagaaggagtaatatacattgctgatcaggcaaagggaccgacctcgtggtagactcttggactctgcactgctgctaaaggatccattcccaagatgaaatggttgatgaaaacctggaccaccgcggggattattttcatgccaccactaccaccaattacaccagccaactgattatcctgttaacaagaagaagaaagaatcaataaaagatatactaaacaacaactactgaggaagttcggattgtccatatactaagcagttaagaaagatgacgcattgctcaaaggatcgtttcctggattggataccttgagaacaatgattggagccatggacgacaacggtctcttttttggttgaataaaattagccggggcaggagggagttcatcaggggatatctcactaggtgttgagaaatctcccatttcgtcgttgagtacaataccagttgatggagagagcacaccggctccaaatggatagtttactgtggtagttactgatacagcatttcgatcagaatctacaatacaaaagtgacttgttccgtgatctcttagctgactccacctacaaatcaaggaccaaaaccgctttagagccattggtgtgcaatcaataggcttgttagttctgggctcagtctgaaatactccttctgtcccaatttacgtggcggtgttggatttcgagaatcaaaaaagtttttctttgactgcgattttttcataagccttttaaatattttgatttaattattattgtgacttatagtactttttgcgtagtttccaaagatttaaattttatttcaagactaaaagattctatgtccaaattcatggtcaaagttaacttatttgactctcgaaattcacaaaccgccacataattgggacggaggaagtagaatttatctaacctgggcatatagtattcaggaggaaaggtggtattgtcgaaaatcttctgtcgaattgctttggcaaaagatggggaaagcatgtctgatacagttttgctgatatttacaaagtcgggatcaccgaggtccatccgaaatgcaaacatgtgtttcatcgcctcaattagtcgatgcagacctaaagaaccttctgcagcattatagctttcaaggattttaagaatctgcatttccccaatcgcaatggtttagtcagacaattgcgttgtattaagtttagacataattgaggaagattggaaccaatacgtctacgtctgtgttattagaaggaaaatagcagtacaagctaagttggtttatatacataccagagaaatccccagtgttccactggacggaggtggcattccaacgatggtgtagcccatagcattaacggtaactgcttctggagtttccactttgtaattcctcaaatcgtccattgtcaaaattccacccgcttttttcacatcttcgacaagcttttcaccaacctctccattatagaatgcttcaggcccttgttcagcaataagctctaagctgtggctaagttttacattatggcaaatatcacctgcccgtaacaatttcccctctggtgcaattacttgtcgtaaaccaggatctttaagtatcaactttgcttttgacgcaatatgatgtgcaagatatggagcaaccacgaatccatctctagcaagtttaatcgctggttgaaatagggtcttccacggcaacctgccatgttttgaccaagcggcgtgaagaccagctaactcaccgggaactcccatggacaatgctccctctaacttggattttccattattatcatacatgttctgcttgaggacaaacaaaacaaattcagaacctgcaacttcgtgttgtctatgtttatatactaaatactaattccaattcccaataagagcagaactgcagttttctcatgtagacagctacaacagctattactactatgcctcaattccaagcaagttggatcagctacatgaatcctcactgtccatttcgcttcattaagccacagtttacttatgccgatacaaattaaagaatttaacttctatacactaataacctaattgtattttacaatatcagtacttcaatccaaagcaagttgggatcgattatacgaatccttagtgttcatgtctctccatttgagccaaagtttacttatgtcgatacaaattaaagaatataaacgtaatacactaacaacctaattgtctttttacaatatcagtacttcaatccagagcaagttgagatccgcaatatgaatcctcaatgttcatgtcgctccatttaagccacaatttactcatgtaggtacaagttaaagaattttaacttatatacactgataatataattcttttatacaatatcggtgtatttaacttggtgtaataggcagcgtgtcttattttccacattagtattcccactatttatggacgattgcatgtaattttcggttaggtgacctgatactgtaaaaattcatttctccaaattaaatagttatttgatgatgtttggatgagttgaaacttgaatgagaaaaagcaatgctaaacgagtgaattacgaacctgtgaagcagctaaaggagcagtttccctcatatcaatagcttgaacttctgatgttgatgaagatctaacaaccataaaacctccaccgccaagtccgctggccattggattgacaactccaaggcaaagtgctgtggcaactgcagcatcaacagcatgtccaccaattttaagcatggatataccaatttccgagcatcgaccatcatcagcagcaacaactgcttgctccgattcaacaacgtcagcattttgctgcagttttccattatatctctcaacatctccgattagccaaataccaacgtgtccatggtgtctaaggcctataactaaattaagatggaggaaaaaaaggaacttaaaaatcaaatgacaaagaagtgcaaattgcaggtgctaaaataattgtgtaagctcgagcaacttcttgattcttatttcagaagataattagacaatcgatgttaaaggtaggaatatacatgccaattctttatattttttataatggaaatatgcccgagagctaatggcgcattgttcgaaactcaatggatagtgggcccgctcctctaattctcacttaaagtaggatttttgtctatgacaatgttccactgctaattttggtttaaaaaagtaggaatgtacatgccaaattttattttttgataaccgacaagcgattatcagaaaagtgcaacccggtgcactaagcttccgctatgcgcggggtccgcaaaaaggcccttgtggtctggccctttcctggacccgttgcatagcgggagcttagtgcactgagttgccttttttggtaaccgacaaatcccagggtcattagcgtattgttcgaaactcaacggataatgggtccgctcctctaaattctcacttaaatactaggatttttgtgtatgacaaggtttgaacctgtgaaatgcgcactcacacatcacaagttgtgcttttaccactagaccaaaaccccacaagcttgtacatgccaatttgccaggtcaaatattatccaattcaagaaagcctgtaaatttgacaatttttaggcaaaaacccagaatttgatttttttttaaaatatgtccttacgataaagggtcagcaaaattttacgctctacggtaattactcaacaaattctttcacaatttcaagatttataacataacacttcacttctcttaagtaaagctaaagagagaaattcctgttaggatcaaaaagtcacgtgtcatgcggaagctagtaacacaaatcttgaacgacgataaatcaaacaacaaaagagaaatataccaaaagagacacaaacatttaacgtggttcggtcaactgacatacgtccacggcggagatgagcaatccactatatataaaagagagttcaaaatatcgagataacaacctcacgaagaggcaaacacaagtgatacactaacatttgtcccgtaaaattctccccctaaacacgactctcaaacctcatatggctacatcgtggatgttagagataaagttcaatctctataagttaggatagaaatctctattagttaggatagctatgttctgttagctatattttaggatatatgattgttctattagttaccttatctccctagtcttctatagtgtgttgtagactgttgtatatatattcaactatgtactcaatagaaaatcatcgaattctctcaacatcatctctcataatgctactgaatgggaaagaaagatctcaatttatagaagttcaaacatttttctaccagaaaagggactagccaactatggaagcattatattttccttctaggaaaagaaaaactgaattatggtaaatatgttgttctttcctccgtgaaataggaaaatcaattatagtaaaaaaatctagacaaacacgtaacaattccataatcatggtgttaattaacttcatttttcatagctttttaaagcccaattaacgaaattcctacagaattcaactgaatattctgttaacagaattgcaaatactaagaaaacaaagaagaagacaaaaagtcaaaggtgaaaaactcacatgaaatggcagtgagtgcaaataaaaagcaaagagcaaaactccatttcttccttctattgaaagtagcaggagaagggtccaacaatggagcttctaaattctgtttactcat

SEQ ID NO: 39 - DNA, 2525 bp, Nicotiana tabacum
tcagttgtgtcctgtcaaaggatctacttttatgcttgtggcaacaattggacttctaaccacatatttaccttcagtttctacccagctcaaagaaccataaaccacaatatcatccataactaatggaccttctattcttagcttgtagctcaacttttcatacttctctttgaaaaccaacttttcaggtacaagattaactttaaatttacccattgtggtcaattttgctgtgtatactgacataccatctccaatattagtcacggtcctctggaattcttgtatccttctaggatccgactcgctgctgttcccattgaaaaatccaatgaaagatggatagtttaagtccaatgatgggttggagcaagtataagatgaggatcttgtgatggtttttatttgtttggatgtgaagttcagagcacagagaagattgacataatcttgtggtgtcgcatcatagataagtccaggatctagtgccttgtttggatcgatatggccagctcccatggctagaggagtagcagcagcattcttactacctgttgagatataatataattaaatgattaaatatatgctctctctaacatataagcttacttgattcaacatagtatcagagcatgcaagaggtcctaggttcaaatctcaccgccaccaaaaaagtcataaaataattccaagtgtttggtccatgaaaaaaaatcaaacttttagatgagatggtcacacaattcaatattacctatgtctcggatgggactttgtgtgttgtccatcgcattggaagtggtcatcatggcagatcggatggctgcagggctccattcagggtgtgcggcttttagaagtgctgctacaccagaagcatgtggacatgacattgatgtaccagatataatattgaagttactaaaaagttttcctgaggtaacatcagtcactggtgattgttgtggccatgaagctagtattaaggcaccaggagccatgagatcaggcttgaggatacttggacagctcggtgacggtcctcttgagctataggtagcaacttttggtgctggtttagcaccaatatgtgtcactcggaattcaagttttcctttaggtgcagagttgctcttaatgtactctagaactttatcaccctcttgtaagttcaagaacacagccgggaattcgctttggaggtagaattccaaatcagttatattagttatgaagacagccccagcaacttttgaatttctcacattgtacacatgctcactgaccgaatcattcttgtcaaggcagacaacaatattgtgtgcacttttttgcagttccttgtcatcttggcattcaacatagacaatggagctttcacttgaactagaattcccagggtagagcgataagccagtgactgaaactccatttccaagagttaatgcgccaataaattcgcggtcaactgtgccagctgcaacagttagcacccaaggtgttccattgtgcaaagtctcataataaggcccttcatttcctgcagaggtggaaacaaatatacctttctccaatgcagcaaatgcggcaattgccacaggatcttcgtgtagtggaatcgcgtctatgcctaatgacaaggataaaacatctacaccatctgtaattgcttgatcaattgcagcaagaacatcagacaagtatacaccttcttcccatagagccttgtacatagccacatgagcctttggtgctatgccaatagcagtgccggtggcatagccaaaataagatgcaccctcgacataacttcccgcagctgtggaagaagtgtgagttccatgtccatctgtatctctagcagaattcattgaaatgttaagatttggattgttggcaagtaggcctttattgaagtaacgagcgccaatgattttcttgttacacaaagaggaattgaactcaatgccactttcacattctcctttccatcttgatggtacttcactaatcccataatcactatagcttttactctctggccatattccagtatcaactaagccaattatgatatctttaccatagtcggacgttggccatacaccagactcagagtttaggccaaggaattgggatgtgtgagttgtgtcaattttaactgacatatccttaattgaagaaacataacctggagaattttttatggcttcaaattcagaaggagaaagacttgcactaaaaccattgatggcattagtataagcatagactagttttgaggacaagaattctttgtgatttgtactactgtctgataaagaagcaagtgttgtcaagtaccaattatgatggctagcaaaagcttttggcatggctgacaaatccatatgaatgatatatgtttctggctttgctagtgaaattatagaaataaagaagaaaagcaaccaaatacacaaggtaatatgacttgccatgttgagtaatatattgaaggaggatattttttttaacat

SEQ ID NO: 40 - DNA, 3768 bp, Nicotiana tabacum
atggaattttaccaaaaactggcaacatgttctcatttgtcgcttttgtgcttcatcctcttacattccattcaagttcaaggtagctactttgatcaagaatatggtaagcaggtactgagctcagcaatacaagataaagattggttagtatccataagaaggataattcatgaatacccagaactcagattccaagaatataacaccagtgctctcattcgtactgaacttgataaacttggcatttattatgaatacccttttgccaaaactggtcttgttgctctaattggcagcagttctcctcctgttgttgctttacgagctgatatggatgcccttcctctccaggttcatacacaatttttttactatcaatcaattatacctcaatcgtcaattagttgggcagttatatgcagttcggagctaggttgttccctaaggggaatcaacatataaagaagtaaagacgaaaaagccacggagattcaatatatagtgtatatacaaaaaaaaaataaaaaaattgacctatttaccctgtgtaattttcgacccaaagggtatcagttaactccccttggataaggttgctctgcccctagttatatgaatcttcttgtatctaattgagaggattcaatatagttaaattatttatgcaccggtcgtcaacctagcacaatcctccaactttatttgaatctgcaactggctatgctttgtgaagcttaaataggtgtagttagaaagaaatattcttaatagtgtgcatatttagttatggaatgtctctaacattattctcgagtgaatataaccataggagcttgttgaatgggagcataagagcaaagttactggcaaaatgcatggatgtggacatgatgcccacacggcgatgcttcttggcgctgctaagctgctgaatgagcgaaaggacaaacttaatgtaagtttgttaaccttacccacttcactaatgctgattcatttggaatgtaatttgtgcttgtgtgattctttaacaaaagattttttgcacaatgttgaccaatgaccagattgtcttgttctcagaagtaataatattaggtttgcgctatagtgattatgctgatcattttatccgttgtgctttgacttcttatctaggtttgcatgtacactaggcctttggagcttattctaaaagggggtatttcttaaacatagaggactgtaagaagatagatgaaaacattctttaatagaggggggtattaagtgtactttgtcgagataatgaaagaacagactcaaaaggaatagaccaaaaaggatatctttttgctttgttatcagatttagttcacttattcacatgtctccctcggaacagtccaaatttcatagcagtgtcgcaaaaaaggaatagttgtgctgtttgttatcgatgatgcttcttaacttggatatgaccatgttattctttgattctttaaatctgaaacttggatcgtccttctgtgggtgactagcagtgcctgtgggtaatcatttttgccttttccttagatgaacatataaagtgattttgcccattgaacatagttgtgaccattcatgattcatcaattgtctcgatgtggagaacctagccctctgatcctccatggcttgcgagttcacatccagatgaagcaaccagagaaactaattcaggcatgacgagaaattttccggtcaagagagaggatcgatcagaacctgttgaaggaaatggtagatgacggagcattggcccaaatcaatttctctctggaaccacgaaaaagaagctgagaagaccgataacttctatctacattacaataacaatacatggctgcatgtataggaaacgaggaaaccatgaatgtttttttgaattcttttttgcttgaccaataaaaaggaattcaagactgaaccacactttctaattacttgttagtctgtaattgtctgactgatactattagatatttcttttcaactttataagaatacatttgtcacatgacactcgtaaagcactgttcgaattgacttaatctgtttttgccctttgtgtggcatcattcattatctatccattcttggggtagtctacaatagaaagttgatttgttgcttgtctctatttttattttttgaacccgaaaagggaacggtaagacttgttttccaacctgcggaggagggaggagctggtgcatatcatatgatcaacgaaggggctctaggtgatgcagaagctatatttggaatgcatgttgattttaaaagacctacagggagcatcggtactagtcctgggccgattttagctgctgtttccttctttgaggcaaaaatagaaggaaaaggtgggcatgctgcagaaccccatgctactgtggatccaatacttgctgcatcatttgcagttgtggcattgcagcagctcatctcaagagaagtagatccccttcatagtcaagtatgtagcctaatctcaattagaagtataaatctttggtttacacacacacagagacacacagacacataattatgtaggtacatatattcccttcaggaacatttcttgttttagaaagcagtatagcatttgagacctgaagcctcattgacagttaagctgactgagattgaaattctcatttctgcctgaaggttctttctgttacttatgtcagaggtggatcagcatcaaacgtaattccgccttatgttgaatttgggggaactctgaggagtcttacaactgaaggcttgcttcaacttcaaaagagggtgaaagaggtaggttgcttacatgaacctttgactgttgttgactatcaacatctgcacactagattgtctgccagatgtcttcaacatgtagttttctgttaaaaaatttagtgatttttttgagtgatgtttaatagccttaaactgagccttcttaggtactgagagctacgtaatcaaattaataagattaagggtgaataattctcgaacacgtgttcacatgaatatagaagtctcagctgaatgaatgatataacttgtggtctgcttgcaattttcccatgaaaatgccatgtaactctagcattcataactgatcatctttccctgctttgcttctctttctttgtcaaaatcaattttatgcctgtcctcaacatagaagcttatcatttttattattgaatcctctatttctatttcgcattgttgaattagatgctaatcgtcttcaatgtcaagtattgcggcaagatcttactaattaatgtgaacagaacctagatttcttgtggcaattttgtgcatttgtaacacatatttacatggagcctgcaggtaattgaaggacaggctgctgtgcataggtgtaaggcgtacattgacatgaaagaggaggatttcccagcatatccagcttgcataaatgatgagcgcttacatcaacatgtagggagggttggcaaactcctgcttggttccgagaacatcaaggaaactgaaaaggttatggcaggtgaggactttgccttctatcaagaattgatccctggagttatgtttcaaattggaatcagaaatgaaaaactgggctctacccacgctccacactcccctcacttctttctcgatgaggatgtcctgccaattggagcagcgttgcacacagccatagcagagatgtatctgaatgattaccaacatcccattgcggtt

SEQ ID NO: 41 - DNA, 2037 bp, Nicotiana tabacum
ttagatttcctcaactcgtctataaaataggacataggcggccgaggttttgagcttgtcctggctgatgggatacacatggctgtcatcgaagtcataccaccgatcagcaccttgctagattattagaagaaaaaaacacaaagttagaatatctggattaaactgggaagactgtaaaagtctgaatatttgaccttcttgcatattcttcatgatgaagaaataaaaacaatgaagatgcatgaccaaagttaaatatataatagatgcacatatgtgcaatatgtgattaatttagatgcagatgatgcattggaactaaaaaatacatcaaaggaacactcactacgaaataggaagtttctatatttgcccttggaggtaggtttcagtgaccgcccaccacccacccttctccccaagtactgatctttagatgccaattttatcaggtataaaagaatcctatttaccatagaatagaaacaaaaccaagaaaaagaagcaaggtaatccaagtcgcagcaccacttacatgaacaaacgcagtgtagtgaccccctcccatgcttccataatggttgctaattgcataaagcatataccggtaggaagatttgccatctttgtaggccaaatatgaggataaatcaagatcatgagttgggaagtcaacatacgtctccaacttgttcttcagaaaccggttgtacgagaacctcttcaggtggatgaccagaatctccggcagtctccaaagatccaactttttagtagcttggcgatgctgcttgcatgcagggcagtacctaatgttggatataagacaaagaaagttaggcagatcatattcatacttcccaagcgaatgacacaaaattagatgataagatagaatactagaaagatttcatgaaagaagtcttttcccccatgagtggccccaggtaaatagctgaattttattatctcaattactgtctgtagttgctatgaatatacaagaaacaaagagcaacacaaaaactatttcagaagcacaatgtgcagaaaatcaataggtgttacataagatcatcagatgctgtcattgtttctttaacataactgaactagaagttggaagggtactactcatgccatgttgcaaagtcaaggtccaatttggttgaggggaggctaataagaatggtttatccacaataagcaatcacgacgtggtggaaaatattgacagaaatgaaataaaatggtataattggaaaaatacaattatgtaactacaaaagttgagggtttataatattagcataaaccaaagaagaagcaaaaagggaagcattacgagaaatctctgaacattcatatgttatgaatagtgaatacatagcttgcatatgaatggtgtacaatcacagaagtgagggagttgcatgcttaccacatatcttctggccctagaggctcttccttcagaaatgcctcaagacatttatacagagagacagattcttgtggtcttttggcaaaaaacccagatttaaaaacttctggcagtgagctgaaaaggcctgtattgtactgttcaagcattttaggtgaccaacttacaagtacatttaaccgtccagagatatctgtggactgtaatggctcattcattacaatctcggagcctttaaaggttgccttatcatctgataggtaaaattcaaagtccatgtctaaaggttcggcagtatcttcttcagcaatgctttctggaaccccgttaactattgagttgccaggttccatgtctgtgctgacttctgaatctgtacatacttcagtagcacttctatcacagttaagagtagcacttctatcacagttaagattatctgcttgggctgtagtgtggactaagaatggtgtaagtatctgtagataaagactacggatataagatcctgtaagaactctactatgcgcggcaagcggaattccaaatgtcttcatatttgaggtcagctttccgtatatgtaatgcct

SEQ ID NO: 42 - DNA, 3773 bp, Nicotiana tabacum
  misc_feature (2402)..(2511): n is a, c, g, or t
ctagctaacctggttttcactagccttgtaatacagcattttctgcacataaaacatcatgtatccttgcgcagctctcacaatactctcgctcacctgagttatccaggcatcgtcacatttgtaccattgattgcttaacctcagatatgttacgtaatgaccagcatcaagtttaccagtatgggtgatgacagcaaacaactcaaattccgaggacgattcacaggacgcatcttgctcgtccccgtcaaaggagaagattctatttccaaatcgactcctcaagatagatgaagagagataaggcgacatgtccaaggaaaaaggaaactgtaggtagtgatcaaccttccttgacattttcttaatcacagaatgctcaaaccttttgatatggaagcaagaaactaaaggcagttttcttatggacatctgtttaagagattcctgtctcacttgacaatgttggcagaagaacttctgatcagaacccaatttctcaggtcttgtgaaatgatctaagcatcccatcaacgtagaaattcgaccgttttggctaaactttccagattctgcctcctttttgtgagtattatgagacttctttgatgtcatcttggcggaactcccctggctcagttccaagtccaaggagatgtctatacatggatcatatgtagtagatgtgaagccacaagctgtacacatgacatcagaccgcaagatcccagaaaatactctatgagcaatgcaacagtctccgctgcctgcacaaaagaaaaaaattagtcaagattagattacagatgacaaagtgcaatgtgtactgctcctaataagttacatacagtaacatagtatgcacagcttaaagtgctcctcaacacatttcataaaaagcaaaagtccagttatgccataaagacaaaacaacaatggtcctatgaggaatggcaaccaacagaatgagtagctacaagcaatggagtacaattgacttttgtaaaaaaaacctcagtaagaaaagtatccgcaagacactttattgcctcaaaaggtctattattccatttacacaaaaccattcaaaatcatagatccttgtattcattatttaactgcaacaaccaggtgttaactaaattttgcaaactcagggtagccctgtactaatcctctaattaagaggaataagaataggtgttaactctctcaattaaagtacgtgtgacttaagcgggaatcaaatcagcatatttacagtggcagaaatgaattgtttgctaaggagttaccctactaatgattgctctgctaaagaaatttgaggtaccgaggaggtagactcacaagaataataagacacacaggggcttatagaaaaaagtaagcaaaaagttgtcaacctagtaaagacttcaagctttcttgaaggttgcgatcagctcactcgagagtaataccctaaaacatggtaaaagtgcgagttaatatgagaactattgtaccagaagaaaactcctatgctgaaatcaataagactaaccaaactgagacttactgggaagagtaggaggaaatctttttccttttgagaaacatctctaagcctgacagcgaatatcaactggtaaatcgcctatggcaaagaaaagacctaaaccataacctgcattcaaatatttctatcttttctcagtgacaacggaagttgggattgccatgagagatgagatgctagaacaacaaagataagcctatcaagtaggccctgagtgcattttagttagacgttacttgacatcacaaagatgcttgaacacactattctacttcctacagaaattactttttccaccccctctccaccaacaaaaaagttcaaaaaattcacctactgaagtacttgacctttgcaagtaactatacaaatttcagtaatccacttatttgaggtttttactgcactagcctcccttgactatgttagatttatgttgctttattaaaatatgcataaacaatgttgccaataattttcacagcacaataaaaaatatttaatctcaatgattggtctaattcggaagaaaaggaaaaaagaaagaacaagaaactaactatgcaaggtgatggggggagaaaagatgggtaactaatagatactctaacgcaacaaacaaatatacctggactcaacgcctttcctttatcgttctgcatcctttcatgaatcccatcaagcacggaaatgaaaaactcatgagcatcctgctgttcataacttgcaagatttgatgcatgcttccaccaactgttccaaagaaaggtttacatccatcagaatcagatacagaacagactgcaattagatactcaaaaaaaaaaaaaaaaaaaannnnnnnnnnnnnnnnnnnnnnnnnnnnnnnnnnnnnnnnnnnnnnnnnnnnnnnnnnnnnnnnnnnnnnnnnnnnnnnnnnnnnnnnnnnnnnnnnnnnnnnnnnnnnncaatataacaaattacaaatgtattatatcacaaccaagttacacaccactagctaattttacttcaatgaagggataagggtggtacatataaccccaacaataaaaaattaatcttgtccctacatcatttgcaaataagggcacaaccaagctaaataaggaatcttttaccaatatatcattatccttaaaaaagaattataagtatacaacaactatgcctcaattccaagcaaatctggatcacctatacgaacttctcacccaaaaaaaaaaaagaacgagtgcacattataagaaagccaaacatgatctcaacaatccaagaaaacatgatcaaatgcagacctgtagaggaactttgcaggactaataggggtccaatcgccggagaaaacagcagaaaacattgcatccaaatcacaagctaaacacagcattgttgagttcttattcccattatcactactactccttgttataacactgttattctttcgctggcaaaaatatctgttatgcttgtcactcagaaagtaattcctcaatggtggtgtatgaagcaatgcttgaagcactgaattcataaaacacgtgtttccaagattgttaaggcccctcaaaccccattgtacttctggggttgttgagtcattgccgagctgactcggcaacggactcgaattcccaacgatcaagacctgctctttcacatcaggcgtccacggcttatactccacgcgcctcctcttgcgcgtgttctccggctgcggcggagggtcttgtattgatccgatcacggtagcctccgtctgcgctagtactacggcggcgtcgaagtctcgatcgtatacctggtccctacacccgcagcagaacagctcggccctgtcgatgtccacggcgatgctgtgcagcgagggatcggaagcgttccccaccggatgcgacggcgcgtgcacacggcagaataccgcggcgcacgtgacgcaggcgtacaaccgcggcggcgcctgtccgcacgcaccacatctcaccagctcattcggcggctcacggcggatggacgcacgccccaatggccggaccttcacgcagccccggaagttgaaaaatgggttcgacccaactctggatcggagctccgacaaatgctcgcatgtaccactatcggtataaacaggcgacccgtttttattttcggatccgggttggatcttaccgattgacaaatggatcttaagactgttcctagacat

SEQ ID NO: 43 - DNA, 4292 bp, Nicotiana tabacum
tcaagaactgctcttccttcctccatttatgaaggcctcaattggttcggcatggatgtgcttcattgccttcactcccagcgggttgtccttgctctgtatcaacaaatgcaatcacgagcattgtttagaaagaatggcgagcaacatgctacaaccagttaaattacactgataatatcaaaattctttggacgatcaatgtatagaaatcaaacttctctttagaaataataagtgcgagtcacttactattgagcaggtgcctgcacgaatattgcagacaggatagtcgtgtgggcaacaactgtagtgatcttcacagcaagtggctccttcaagagggcaacatccccaagaaaagcaggagttatagtattcaaagacacaacagcaagtggtaccctcggggcattgagcataatcatcacactgagtaggtggcttgattggagatggaggagaaggtccaggtttagggggatttacgcctgtcttgactgggtaagaaggctctatggctaatccacacaaacctttagaactggcaacgttacgttgaacccgaaggtaacctttctctccccaggaagcaccccaagagttcctgataatccaataatccataccattctcactaccatatccaacagcaaccacgccatggtccactgcagttccacattttccagtaaagataccctgcaaaatatatgtattagaaccatatagctactagccaataagaacttcattataataagatttaaatatagaattgtaagtagtgataattggtaaatcatagtttttgaattataacaggaatctattaactcatgcagccagcgttatcttttgctacattctttggtcgaaacaaaactattatatctgatcgaaaggtaacgtattactggaacgacgatgtctttctttgaattctgtgactaactaaaagacttcagattttgcatgttcacttgtatttattactttcagaagaaaaagataggtcaatgcgaataaaaacattaccgatacatagtgttgaaagtcgtggccaccagcttcaatggcaatgctcacaggttgatttgcaacagccttttgcagtgccttttcattatttgcaggaacatcttcatacccatctatggtaacaaccttggcatttttctgcatgacacaaatgtttcaataaataaatattcaactcactacataaatcaatatataaagtgaatttagtcatttcaagaatgcaaaatttacccttgactggtcacatctgccatcacggcctgtgtaagggtagtcttcctcagtgtcaattcctccatttttgatgatgaaatcaaaggcatagtccataagaccgccattgcagccgtcattgtaggaagtatcacaatccaccagttcttgctccgatagtgaaatcacatctccggtgactatcgagttcactgcttcaacggaagcaattgcagagaatgcccaacagctccctggttcattaaccgatagattaatacacaaatattgagccatacaacataaataatgaattgagaaatttgaactcagtgatttataaaagaaactgatatgcaggcattaataaagaatacacgtcagtgtcacatggtatttagaaggcccgtcgggtcacttcgtgtaacatttgagcacattaagaggtcgtttggtagaatgtgttagagaaaataatgcatgcattagctttgtgtattagtaatgctttgtttgatacactttttcaacctatgtataacggatacaagcattagttatacagtctatttggtattatcctatgtatagctaatgcatagaaaaccatgacattagctatatcgaggctattaatacttgcattagcatggttaaagacaaaattatccttaaagtcccttaagtaaagaatatggagggcatttttgtaaacaattaaatatctaaaaaattatgcaatgcattttaatttttaatacaccacaccaaacaatgcataaaaaataatctctgtataactaatgcttgcattacaaacccctgcattactaatgcaccttatttagcattattcttatacgccctaccaaacgacccctaaatgttgtagcaactagcaaatattctagtgccaaaactcagcatcaattggtcagcattttctatcattatcaagttgtgctgttaagcttttcaccctataataattgctcatgcgtatagaaagatggggtcggggaataatgactaggaaaaaagaaaagatggggtcctggaataatatgattaaaagggaaattcggtgccctaagctcagggtatgtgcgaggtgcgaagaagaagtggatcataaggatttattgtacgcgaccttaccctgcatctttctatacaccaaaaaatgtaaagaattgttacatattactaggtaaaatttgatctataacaaataactcttcatatatataataccggcataggactatttaaacaataaaataacaaactgttacacccaattaaattacactaatactataaaaaattatactatcaaagtatagaatttaaactcgaaggaaattgtaaaaatagcacggtatagccagttttcggattggtcattcaaaaatagtcagcgtttatcaagtcaatgaaaaatagccactattttgctgcaacaaagaccgatccaacataatatactggagttcggtgcaactgtgtatgaactacaacatattatgctggaccgatatactttgttagctccagtatattactgtagcaccggtgctccaaactccagtatattatgttggaccggtatacttgatggaactccagtatattatgctggagttctagtgcgcttatgcagatagagttccagcatacttatcctggaactccagtataatatgttggagttcaagtatacttatgctggaactccagcataatatactggcgtattttctgagttttaaacagtgttttcgctcaaatttatctttacataaaaagtggctaaatttcgattacttttaaaatttggctatttttgaacgaccagctattttttattttcacacaaggaaatcataaaggtatcctacgtttatgcgtagacacacaaattggctttctactcatagaggactagaactgaacgccaccatactattgacatgagagtttatttaagtgcaatgaaagtgtaaagaacagaaaaaatatttaaatctgatataataacatagaaaataattcttgatatcgattctaatctaataaaataggaaataataaataactagttatatttagaaacaatttaactttaacgttttcattttatctattttatcattagagagaaacttttataatcacacgaatgttacccacaaatcttttgcccttgaccttttaggaccacatgatcaaaagttttcttttcttctttttttttaaaaactttatatcaagtcaaattatatcatttaaattgaaacgggtagagtatttatatattttagcacaataaggcacgtatgatttcctttgtttgtcaagttcgtagaaatactttctacatataaattaattatggtagtggaataccaatagcctatctctatatgctttaataacaaattaaatcaggaaaatatcatctaaaacgccgtctaattaattatagatccataacccaaaaaccggagataaacgaaaaagacaaagccattgctaattaacttaccacagcttccttgatccttaactccaacaagaacacctttctctctccaatcaactgagtccggcaagctatccccaactttaggaagataccgatcgcttttgtttttcaacaacctgcgacgatcactggtcttagtacctaagtacatggacctgtactcctcgttggtcagatcagcaaatttggttaaaccaagcttgtaactcttgtttggaacggagttttgttcatcgatgtatcttaagttatctttaaagatctgaaaccgcttgtctttttcgtctaaggcgttgtacgattttccatgttcgagtagccatgactcgtacaaggacatgacttcatcgtccgttcgaaagtgttggttttcgtcgtaggttaagatggacatgtcggaagcggaagataaggtggagaagaagaagaagaagaggaggagaagtagggatatggatatggtgagagtggagctatgagttgccat

SEQ ID NO: 44 - DNA, 1390 bp, Nicotiana tabacum
ttagagttcatccttaggtgctgttgcaggagaccctgtggggttgcttgatgaagtcttgatggggtaggatggttgcattgctataccacacaatccctcttcagcatcaatctcgcgttgcatcctaatgtatcctttttctccccattcaggtccccacgagttcctcacaatccagtatttggttccatcaagggttgtgccatagcccacaattgccacaccatggtccaactcagtaccacagtctccggtgaatacaccctgccatatttacagttcgtaaatgtttatacctagtaaaaaactttttaacttgagataaatggtctatcatcatttacctcagagtagaactggaagtcagaacctgaagcttgtatagctacagaaacaggctggttggctactgctttaagtagggaatcctcatcattaggaggaacatcctcatatccgtcaattgataccacaggagaattcctctgccaattccataaaattcatgcacgtggattagaaacaagactggttcgatctgacagactgacaccctacagatgtaacagaatcttaccttttgaatatcacactcgccaccttcagccatgtatggatagttctcttcagtattgatgcctcccttcttcttgatgaattcaaatgccatgtccatcaaccctccattgcatccttggttttgactagtgtcacagtcaacaagttcttgttctgataaagatactaactcatttgttttgatttggtttatcccctctactgcaacgacagttgaaaatgcccagcaacttcctataacaggcaaaaggtcagtttccatcagctataatattttgaaagaacatatcatatggtttacccttatgttattatgctagaggtgtaaagcggcatagaattaatgacatgctactcttttcttaccacatttgccttggtctttgacaggagtaacagcacccttcttcctccagtcaacagagggagggacatcttccacattggcgtacatgaaagttccatttgctcgtgaagctccaagaaaagaacgatgatgcttaatcttggaaccagcataatggtgtctgaattcatggttagtcatgtctgcaaacttgttcaatttcaacttataaggcttatccttcttgttgaagttgtgaacatagtgtacattagccttgaacacattgaacctcttgtctttctcatcaaggctcctcgatacagtgtgatggcttctccatctctcatacaactcccacaatttttcctcagtttccaactccttctcgtggaaatcgaaactctccccaagcctaagtaccaaagccaaagagaaaagaaccagaaataacttcttcat

SEQ ID NO: 45 - DNA, 5092 bp, Nicotiana tabacum
aaaaccaacctgtgagacattaacatccaactcttgggcaatgaaatgggcaagttctggaatgcgaggcttcaactctgagcagttgacacttagtgacaagtaaaatgtaatgagcccaactttaatttccactgcaagtcgacataaaagatgaatgtgattacaaccataagtctttgtaatggaattatctaatttcaatagccatcatatctgcaccgaagcctagctcaagtttgtgagaatagatgtagtgaagtagaaaaaggggactaatacttgcaaaactaaattgaaatcttgaaaagttttacagcagataaaagtcaaagcatttgagattatgcaaaccattgaagaggtacatcaaattgaaataatacaaaacagggctatgtttcaacaatgcaaacaggaaatattaggcaggaaaaattttgcgattctgtcattactttaaggtcttgccacaaatttctcatgcttgtcgttgtccagtcacaaaattcactagaaatttgacaattgattactataacttagtggatggattttcagatagtcggtatatggtcaatgcatgttcacttggtatcagttgtcgtagtccttagaaataactttttggtcccttgattataccatatttgtactttagatccctcaactattcagctttacacattaagcctacaatttaacgaactttacagatgtagtccaataataaacaaaactaactaacccacgacatattcatatttcaagtctccttttttaataatacaaatttcaaaaggagcattaatgttgtaaaagtaccgttgcctactaaaatatcccaaaaagatgaacacgctgctttggaaatggaacgcaccaatcacacgagttgcggattaacaaaatctaaaaattctagttctaattaagatctgactaaatctgcaaactcgacaaattaaaaggcagatgtcaaagtcggagagttggactaaaagtggaaacagggggataacaggggaccaaagattttctcagtattccttgaagttattataataaatttccagtttaagtaaatctttctcaaactacaagaaggctgagaatgctgtgacatcagtacaattttatgcaggcagttgcttcttagaaattttaaaataccagggaaacaagatgattacaagactaatttcagagaaaggtcagatgtcaacttgaataggattataaacagggatctttacacaaatagccggctatattcatgtttactttttctagccatatacacagattatacattgatgatacacaattatgcacatataatacataaattatgcattcacacaaataccagcattctggacataagagacagaatgttgattgcccaaaaatgatctaatcgaaggcaacacatcaaaatcagcatgatgcaattctaattttgattctcattttcataaaagaaaccacaaaccattatagttcaaaattgaagggaaaattgaaaagggaattgtattaatctattagaaaacagagctagtagagatgcgaaaaatgaaaccagttcaggttatgacagcattctaatgggcagagtaaccttacagtaaaaatactatgtgaagaaaagctgtcccttcataccaggtgtgttgtacccagggggtccactaggagctgatgaaggagacaggtgcgcactggagtttgtgttatccaagcttgagaccgatggtgaaggtggagatggaggggataaattgagtctgtcccataactcagaacaattagttttccaaaaaccaattcttttattttcacgatcgtaagtaacaagagtgttgcgaacaacgattcctgttgcaattaaaagcacgcatgttacagcaccgaagacctaggacgatgaactttgtcaagtagttagaaatacctccaagaagactagctggattctttccattcgggaaaattcctaggcaataagcaccacgtactttgaagtgctttatagcatacaagttacaatgaagaagggggaaattaatcaatactaaatcttataaagaaaaagaagccagtagatgtgacgccaaaatagtgtcggcagatagttaagaaagaactaaaacagaataaaatgcctacctgaaacaagtaattttcaggagagagagttagtttctttccatcgctgaataccatatcgacacgcggaaagttctttgagagttctgatatgttgctggaatatataagacattaaataataagggtaacaccaacaataggaaaaaaaaacaaatttagacaagaaaatcatagacgtctaattaattttggaactctccttataaataccttccagcaccagaaaagcagatatctttaaaactaggatctggcccttcaatctgttttaaagaatgaagctctttcactacctgaaaagaaaagttgaagaggttaatcccaaaaaggaaaatacttaagtttatctaaagataatcgccacaagttacatactgtataaattcacaaccagtgactccacttttccttcgctaaatgtaacatagcaaaagcaatgaaagacaacatcaaagatatgcagaaacttgcaaggaactctgtatatgtagataattactacctgctaacatcattggaagaaaatgttgtgtggtgtattaccaaattcagaagtttaaaacaggaaaaatcaactattataagtggttaagcaatctaattaggtcctttaatagcagagaaactaacaacaaaagaagggatagaggccataatatagccttcctttcttttgataaagtacatagcctccaactcatcacaggaataagttaggtggcagagttataggatcacaagatacctggttcttacttttcttcaaaaacatgttctagatatcaaagtgttagctctcaaactattattgaccaagatgttttagtttcagtcccactcatgtacaggaatctccaactatatatttgatccacgtcacaataggacatgatggtttgtttcaccaatcagtggtgtaaatagaactttgaatggcaagaaaaatttaacagattgagttacatatagaaaacacattattcaaatgaatatcttttcacatctaatttcttctaggacattctgctcatcaatagcgtgctattcgccactagtcactttctcagacagaacgaatcaaacaaacagacagaaacattggcagatatgtagataaactatatcttacagcattcttgaaagctgcaaatgctgcttctggaaggtacgcataggtggtaccactatcaagtatagtcccatgttttccaccaaaaacccgtggatttaggtttagcggcttcccagcgacatgtatctccttcaggtcaatattgtagtacgggctgttgccatccgagactaaagtaaatgcgtaagatttatcaagtgtatttgctaggaggagacctaacatcactgtgtctctaaacaattgtttccaatacatacctgtgaccaaaatctgatttggtaaaggccatgtcagcagggggttttactccaccaagaaccattgccccgccaccaaaatccatccctccatagcacaaggagaaagaatcactaattacatgtttttcaacaagttgatcaactatactaagatcacctcggcccaaacccattataccatcagcacgttggctgtaaagatcaccagtttccgcaatttcacatccaaaaacagctcgttgtggtgcaagctcacttagatttccaaaagatatgatgtcctctccaagcaacccataacttgcactcatctcagcgtaccgtctctcataaatacattgctgcctcttatggtcgcagggacaagccttattgcatttcacagattgataagtgcttgacatttccggctgaaacttaggatcctaaataagacaacatacagagtaccaccgatcaaaagacaaaaatcaaatgccaagcaattctaagtgctatattaagcatttctcacaaaattaataggctgactcaaagtaaaattactagtcatgaagtttcttaagtgctgatattttctccattaggagatcttttatgattacaaggcaaattgagcaagaatcacatttaaaacatcatgaaactatacaatggatttgtacagcttatcaacaaagagaggcttagaactatttgtatcctagttagattggtttgttcttgtttaccctctttcccttaatacttacaaataactgcatcctactaagcgatttcctcacaaacaaaaagtatattaagtaatgtttatgaaatagcacctatacataaacagtttcaaattttaatttccatatcaagctatcaaaacacactaactgcaaaattaagataaatatgtaacctttaatgtttatccagaaaaagaaaagagggaaaaaacctgatggttgccacactttttacactcagagcaagggacataggtaactgtactccctgtatcaacaataagagcgaacttctgcggtggtgttccaatccaaatatgagttgtatagtatctgcatcacaagttacttggaatccattcaacaaaataaaaattactaataaagaaattagtctgaactagaggtatatagaaatatattccacagtgaaaacgcaaaatacgcatgtgaatcagcagccaaaagagttagtaacagtgaatttaaattttctgagcaaaagctacgaatttgaacccgttgaggaggagatcatcatggagagacatgcgagcgctggcaggacttttctggaggtggcgacgggagatttccgcacggcgtgaagtgtctttcggaggaaagagcggcagcagcatggttgtgtgacggctgccgtcggccggcgaagggaggaaaacggagctgccgttagtaacatcagataatcggaagccggaaacgacaccgtaatggatcaacagagagatgatcgcgagaataacggtgaactgtggccgtgccat

SEQ ID NO: 46 - DNA, 1649 bp, Nicotiana tabacum
tcaatattgtagtacgggctgttgccatccgagactaaagtaaatgcgtaagatttatcaagtgtatttgctaggaggagacctaacatcactgtgtctctaaacaattgtttccaatacatacctgtgaccaaaatctgatttggtaaaggccatgtcagcagggggttttactccaccaagaaccattgccccgccaccaaaatccatccctccatagcacaaggagaaagaatcactaattacatgtttttcaacaagttgatcaactatactaagatcacctcggcccaaacccattataccatcagcacgttggctgtaaagatcaccagtttccgcaatttcacatccaaaaacagctcgttgtggtgcaagctcacttagatttccaaaagatatgatgtcctctccaagcaacccataacttgcactcatctcagcgtaccgtctctcataaatacattgctgcctcttatggtcgcagggacaagccttattgcatttcacagattgataagtgcttgacatttccggctgaaacttaggatcctaaataagacaacatacagagtaccaccgatcaaaagacaaaaatcaaatgccaagcaattctaagtgctatattaagcatttctcacaaaattaataggctgactcaaagtaaaattactagtcatgaagtttcttaagtgctgatattttctccattaggagatcttttatgattacaaggcaaattgagcaagaatcacatttaaaacatcatgaaactatacaatggatttgtacagcttatcaacaaagagaggcttagaactatttgtatcctagttagattggtttgttcttgtttaccctctttcccttaatacttacaaataactgcatcctactaagcgatttcctcacaaacaaaaagtatattaagtaatgtttatgaaatagcacctatacataaacagtttcaaattttaatttccatatcaagctatcaaaacacactaactgcaaaattaagataaatatgtaacctttaatgtttatccagaaaaagaaaagagggaaaaaacctgatggttgccacactttttacactcagagcaagggacataggtaactgtactccctgtatcaacaataagagcgaacttctgcggtggtgttccaatccaaatatgagttgtatagtatctgcatcacaagttacttggaatccattcaacaaaataaaaattactaataaagaaattagtctgaactagaggtatatagaaatatattccacagtgaaaacgcaaaatacgcatgtgaatcagcagccaaaagagttagtaacagtgaatttaaattttctgagcaaaagctacgaatttgaacccgttgaggaggagatcatcatggagagacatgcgagcgctggcaggacttttctggaggtggcgacgggagatttccgcacggcgtgaagtgtctttcggaggaaagagcggcagcagcatggttgtgtgacggctgccgtcggccggcgaagggaggaaaacggagctgccgttagtaacatcagataatcggaagccggaaacgacaccgtaatggatcaacagagagatgatcgcgagaataacggtgaactgtggccgtgccat

SEQ ID NO: 47 - DNA, 4140 bp, Nicotiana tabacum
atgggagcaaaatcttttcttgtcgcctttttcctttcattgctgttatttcctttggccttctgtacatcaaatgatggcttggttagaattggtttaaaaaagataaaattcgatcaaaacaaccgacttgctgcacgcgtcgagtccaaggagggggaggctttgagggcctcttttaggaagtataataatctccgtggtaatcttggggcctctgaggatacagacattgtagcactgaagaattatatggatgctcagtactttggggagattggtataggcagtccccctcagaagttcactgtcatctttgatactggtagctctaatttgtgggtgccttcatcaaagtgctacttctcagtaagctttctattacatttttactgtcataaaacataacagagaaagctaatgttggcgtatgcataattgacgagcatccatatttatgcgtctctgtatttatgcaggttccatgccttttccattctaagtacaagtcaagccaatcaagcacttataagaaaaatggtttgtgtcttgacctttgtctatagctgaaattgctgcatgaaaacatgcttttctcttaaacttgttattacgctcaatgcttgcttgtaagagaaagtgttcaattattgcgttttgagatcaaaactgttaaccctgctcccaacttaggagatttaaaaaaaaaaaagaaaataaagaagacccttaccattcttattgttgtcatccaattatgtgccttgcaccaaagatttctgttgaaaaatataacatgcgagattatgttgttggctttccctcccaaaagatgtgctaatgttatatctctgatttttttctttcaattattggcaataaaagcttgtgccttttgaaccgttttgtctatcgaggaacctgttatggtggagttcctttattgagttttggtatccatcataatttactttccgggaaaattggagtctgctgtgtgattgacatgacatgatttttgattattcttctctgtctgctttctaagtttctacattctcggtagaggtaagatatgcgtactatctaccctccccggaccccacttatgggactaggttttttttgttgttgttgtcgtcatctactttctaagttggtcaacgtgttcacttggttgttgacataagaacctgttcattcaaacttttttcctgtttaatatgccatacagggaagtctgctgccatacgttatggtactggagcaatatctggatttttcagtcaagatagcgttaaagttggtgatctggttgtgaaaaatcaggtgaatgtggcttcccactttgtgtgtgtgtgtgtgtgtgtgttttaaaatgtttctcgagcatatagtctctcatcttgttaatgacatcaggagttcatcgaggcaaccagagaacccagtgtaacttttttggtagccaagtttgatggtatattgggtcttggtttccaggagatttctgttggaaatgctgtaccagtatggtatgtgggtttattttgtttgtgttctcttctttccaaatgtttcttcaatttcctattatccaagtgcgtgccttgtgaatttcattattacattgaaatgattttatcttctggacagaatttcattaacatctccttctgtataaaggtttaagtgatactggtcttgacagtttcttctgtgttttataggtacaacatggtcaaacagggtcttgtcaaggagcctgtcttctcattttggctcaaccgaaatacagaggaagatgaagggggcgaaattgtgtttggtggggttgatcctaaccactataagggaaagcacacttatgtcccagtcacacggaaaggttattggcaggtagatatccctatatctttgggagattgatgtttggcttttgcaaccgttttcttactctcagaatataatttgcagtttgacatgggtgatgttctgattgatggtcaagctactggtatgttatgttacttccttttctatttttttgtgtggagatttcgaggataagatgagagcactttcacatgatttccatgctttttcgttgtattgacatactgaatactgtaggttactgtgacaatggatgttctgcaatagcggattctgggacttctctcttggctggtccaacggtattctcaaaaacatgttccattttttgttcctcttattcagctattatcaataatgaactgtctcataattttttttgtaccgtcctgttcatgtgtaggtttaattttttcgctggaatatgagttgaataataatcagccattcatttgaagtattctcattttttccgtttctattcaaaaaaaaaggaggatggcaagtgcagtgatattgatattcattccagtatctggacatacttccttgttgattttcatacctaagaaatgtttctttttacttttgatctgttgtttctgtcttctttgtgtgctcttcttctttattaggaaaaaaattgtgcatcttgagaactgcttcttaattgttttcttttatggcatggttgacaatatgatacaaggaaaaactgcagcttcttttgtctagacaattgtagtagtgaaatgctttactactacatttctagttctcatcattcttccctgtatccttcctcctctatcttgcagactgtagtcactatgattaatcatgccattggcgcctcgggggttgtaagccaacaatgtaaagctgttgttgaacagtatggacaaacaataatggatatgcttttagcagaggtgagcaattatttgttttagttgatagttttttgttgtttttaccaatagttttccgtggtatctgcaaagaggatggtttcatgctactagttgccttcccaatattctgatgcattggcgtcttaacaggcacatccaaagaagatctgctcacaggttgggttatgcacctttgatggaactcgtggcgttaggttaggcttcagaccctttctttcctcgccttggccaatcatttgatatggtaaatcctattataaaatgtgtgctgagtggatttatgtcctccacgtgtagtatgggcattgagagtgttgtggatgagaatgctggcaaatcttcaggactgcatgatgctatgtgctccgcttgtgaaatggcggttgtctggatgcagaaccaacttagacagaaccagacccaagaacgcatcttgaactatgtgaatgaggtaaatagcatcagtcacatgctttctcttctcatcttaagttagattactgaccatctttaacagctttgcgagcgactaccaagcccaatgggacaatcagctgttgattgtggaaagctttctggcatgcctagtgtttccttcacaattggtggcagaacatttgacctctctcctgaggaggtatgtctgatatcaatcttgcgtagtgtacatggcgtcttctcattttgtaaatggctttgatttttctgaacaaagtgattggttgtagaatccttttgtcatgtttcagttaggcagttcatttctttgtggttttcactagattagctagcaaggtgttactctgctttcaagagaagtacacttgtcttttagaaaatttcaaccatgacagctaagtgtcgtttggataattaatgatattgaagcgtgtcgagctttaatatcagtttctttgcttgataagttaacttgtgatcggataattaatgttattgaagtgtgtcgagctttgatatcagtttctttgcttgataagttcatatgattgtactaagcttgcatgcttttcttgtcaccagtacatactcaaggtgggcgagggtcctgctgcacaatgtattagtggcttcattgccttggatgttcctccaccccgtggacctctctggtatgttttcttttcgtcttaacgcacaaatgcgtggattctgttattaccagctcccttttgataatgttgtttgcttatggctttggtggtgcaggatcttgggggatgttttcatgggtcgatatcacaccgtctttgattctggaaaacttagagttggatttgcagaagcagct

SEQ ID NO: 48 - DNA, 4762 bp, Nicotiana tabacum
atggttgttgcatttgtgggcatagccaagtctatcgggcaacaatgcttgaggcgatcaaaaccctactcttactcttacttctccagctatgttcgttcctcaaattctaagtatggactccaaaattggcaatttcagagtcatagaactctaattttacaatcggcttctgaatccgtcaaattagaaagactctccgattccgattccggtaattccactcactttgtcctattttacggcgtactgttactatttggggaatcaaacttcttttaattttgggtacaattgctttctggggttaattaacagggattttggaggttaaattggataggcccgaagcgagaaatgcaatagggaaggatatgttaagaggattacagcaagcgtttgaagccgtgagtaatgaacgttcagcaaatgttttgatgatctgcagttcggttcccaaagtgttttgtgctggagctgatttgaaggtataacagcttctcttcatgttgtgtttttaggaaaaaatgaggcaaaaaaaaaacttttgaaatcttgtgcagagtataggacacactatttggttaacaaaaaatgtgtaatcaaagggttcgaagtcagattaaataacaaaaattatgggtaaatattaaaaattttaaaacttttaaaaaatcatactcgttcaaattatattaaattttttcatttctcctctttgcttcttcttctccttctttcttcgttctcctccttaatttcttatttctcttcaactttcgttgttgttgctgctggttcgtccatgtcatcttcttcttcttcattttatttttccatcttcgtctcattttcatctttcttctttttttcattttttcttttctttctagtggtttaaaatatacgagaaaaagagaaaaatatgaaattttacaaagtaagtattttgcaaaataccctcgagatattttgagacatacccataaatgagtattctactgaaacatccccgggttgttgtttgaaacatcctacgggatatttcttctacttctttctttttttctagtgttgttctcattgatctttttttcacagatgtttcaaacgttcccacagatgtgtgcagatgtttgaaacatttcaataaatgtttgaaacatttctttagatatttgaaacatctttcctaaatgtttgaggattaggagtggcggggatagagagaggagcgttgcgagatggagtaacaaggggaggaggaggagtggcgggaggaggaggagggtttttttttttgtaaataagaaaactttgggggttttaaaaatagtgtcattaaccctaatcacagaagtgtcccttttaccccattcttaacacttttgtcttaaaaagtgatataagttttgaagtgtcttaaaaatttaaatgccccgtgtttttagttgtaatatgttttttcttgcaagcagtatcacaacttgtagatattacatcttccttttcgttatgtatcctcttctcttcattgtgccaaccattgtatttgtgttttcaagcaagagacagatccaagatatgaactttatgtgttcgagttctaaattctgcctagtccatttgatttacggggtttgaaatctatatttgtacaagttttggtgagttttttaacacatatatgtttcgttgattctctctgtaatgtcttgttgtcttctagtatatttttcttttgtatcgcgtgacatgttgacaagaaaaacaataaaatttcacaagctaggagcatctgccaaacatacaactttcaatgttgaaaagtttctctgtggtttgatctcttcgcttgtgcagcctctgtgggactcaaacatcttcacagattcaattttcttttgtggggactgcatttatgattggcatggcatatgattgaatagctgatgtttttggtgtcagatgttgatttacgcactttagtagtctttctactgtttgttatctgtgctgtattttgtacctactgatagctaattcaattgattggcatttgctacataggaacgaaaaactatgattctttctgaagtccaggattttgtaagcactttgagatcaactttttcctttttggaggtacgtgatttttattgatgttttgtttaatatattaaagatcatagtgtcttaaagctcaagaagaagttttttttatcaatttatgaaaagcagaagttatcagtttataatcttctgaattcttccttcaaaatgattggttcatgagatcatactatgtctcgtttcttcttcctcacttattactttatcaaccataaagtggtccagttgtacatatcctcttcttttctttcactctatttgagtaaatattttcttgctcagggtcttcatattcctacaattgctgccattgaaggtatagcattgggtggggggcttgaaatggcgatgtcttgtgatatccgtatatgtggtacgtgctttcttgcacttctgggtgtaccatattttctccttcttgctctctagtttgataatgtgttaacaggtgaagatgcagtgctgggcttgccagaaacaggacttgctgtaataccagggtaggtatgccttaattacgcattatatgtttgcttatgcaaaatcccaaaattctttgaaggatgtgttagctatgtgtggtttatttctaaatttatcagatcagtgggacgcatttccactatctttttgtcactttgtaatcttttactattcaaaggtttccaacttcagaagttgctataaatactctgtatgcatagatgatcttcttaatggtatcctcttatttcatactggcattgtgcagagcaggaggaacacaacggcttcctagattggttggaaaatcaattgcaaaagatataatatttactggccgaaagataagtgggaaagatgctgtatcaataggtacgtgtatgacttgtcagagctcatttgtcaagagacaggactcctttgtctttccaagttctctcttgttaatataaagatagcagtgatgtcagcacttcattacaaattatgggttaacagtgtcctccaaggtttaggcagatagaaagaaatcatctaatttttgcttctgctgtaattttggaccttgatctcctatggttttcttttccaatttcttagtgaataatacattgtatgcagggcttgtcaattactgtgttcctgctggtgaggctcgcctcaagacacttgaacttgctagggatattaatcagaaggttagactttagttattgagataaagaggatgtgatgtatttatccagtgtgccacccatatgacttccaattgcaatttagtcacgaacaaagaagaaacataaaagaagtccaactcttcctataaacaaaatgatttcaaactgtactgtacatagataattgtaaagattcgttagcagtaacgtgtactcttttgtacccttttcaccttttatgagttatgcaccctcttttgtacccttttcaccttttatgagttatgcaccctcaaggccatgaaatatgcttgtcactggattttcttttcttttgtgtgtgttgaatgaagttgaggctcttgtttgaactttttattgtcatccatggaccttaatttaatggcatttactaatcctatgcttgtttgttttccactttgtgcactgcaccttcattttttgtgacaagctttgtttcttgcttttggtctttttctgtcttgttttttcttaggtggaggatcattgactattgcatagttccttgctttggtttctttgttttccttttccccttctttttcgatttttagctattttatggcaggttcacatagaaaacaagtgttactctattgtttttctttcccttttttctccatgcatcttatagaaaccgaagcttaaggtttctccacgcaagctgcaacgttctgttttataagcttcatatatttctggttttcatgtagtatgaaatgatattgagtgggattattaggaagctgagacagattgaaaagaacaagtaaaagccacattggtgattccctcatgctttcaaccttaaaaggtcatttcaatgtccagggtccagaaaagggactcactctattcatgttctataagaatggagtaatccacttgacaagttctggtggtactacttcttcataaggttttattatactagtcagggctgtgttgaaaggatatggtagcatcaactaagtccaattgtttcgtattgtatagagccttcctttttccttttccttttcccttgttgactctgcttttatacctccaaatggaatggtcgtaaagcttttgctctttattcaataagctaaaacttctgatgaataaatttggtttaaggatgcacgaggagtgaaagtaaaataaatattgatgaaggttttgctaaagatgctcttttttatgctcgggttttgcatgtcaactgacatataccttatcaatgtcgactgacatatattctctgacagggtccggtggcgttaaggatggcaaaatgtgctattgacaaaggagtggagctaaatatggagtcagccttagctttagagtgggattgctatgaacaactgttagacacaaaagatcggttagaaggccttgctgcatttgccgagaggagaaaacctaggtataagggtgaa

SEQ ID NO: 49 - DNA, 2332 bp, Nicotiana tabacum
ctagcagcaaccagctataggaacaaatgtgtcagctcgaagtgacattggttggcagctaacatcctcacaactcttgtggtaaagcatcttttgtacatagtacatcagatagcattgtgaggccctgacaacttcttcatcgacttcagtaatccatgcatcgtcgcatttgtaccattggtttctcaaacgcaaataagtcacatagtgacctgattctaacatccctgaatgtgtgaccacagcgaaaatttcaaattccgtagaaatatctgattcatcaccgtcgaatgaaaagattctgttcccgtatctctttcgtacaattgaagatgataaatatggtttcatgtctaaagaaaaaggaaattgcaggtggcggtcaatctttctggacatttttcgggtgggagaatgttcaaagcgttttatatgaaaagatagcaccagcggaagcttcttgatggacatttgtttcaatgcatcttgcttttcctgacaattttcacaatacagtttctgatcagatcccaacttttctggtcgtgtgaagaggtccaagcaacctacaagagattcatttggcttactcgacttattagcaaaatcctttgggctggagttgcagctattcaagtcaagagaaatgtccatacaaggatcatgagttgttgaagtgaatccgcacgatgtacatgtgacatcagatctcaagagcccatagaaagtcctatgagcaatacactggcaatctccattatctgtttaagaaatgttatttttatcagagaaaaagaactagaggaagccacaaatcttcagttctcaaggttatatatgaatcatccctcttctgatcaatgcattgacagcaaatggaagtacaggccaaaattgatatcccagaaaggaaattgcgcatgtacatagacaagatctgtactatatttactcactgcgtagcataatgtcctacataaacaagaagaataccagccattctcagcaaaagatacctttggttgccaaactagctttcccctctttatcatggatcctgtccataactgaaatgaagaactcatgagcatcctgctgctcgtaggtagcaagattttctgaatgctgccaccaactgcaaaaataaacaacatttcaattaaaagaatcactacataagttttcaacatgtcaacgtccaataaaagttaacattttccacgtttaagcatccaatctaaattaaacaaatgatgatatcttaggtggacatagcagcatagagaaaatttcaacagatttattttatcacgataagagaatagcaatcttgcttattgtctgattttagcggtaatgcaccaaatcttgtttatccaaaaacttcaaagtgaaaacctatgcagttagcgctaaaaattgtaaacattatttacaattttgcaggccatgttataatcaaatatccagtatcaatacattaaatggtgagcacagataaaaagcaattaagagataatgacaggagataaatccttttaacacttacagacctgtaaagaaaccgagctggactataaggggtccgatcaccagaaaagacagctgagaagataaggtcaatatcacaaggcaggcacaaccgatccgacgacatctttctgcaaatatctcggttatgcctatcgctaaggaagtaatttctcaaagggggtgcatgaagtaacacttgcaacacagagttcatgaaacaagtattccccaaattgttcaaaccccttaatactaaaggaaaacatgatttcgacttctgatccctccttaaaaacaacgtcttcatattctttgaatctaaatccatcccaaaactcaaccttctcctcttgctcaacctcaactcactctccacaaccccaatttctgttctaggaaaccccattatgtgtttacacatcacaaccttatcaaaatcaggatcatacacctgatcacaacacactgagcaataaagctcagccctttccatgtctactgaaatctcatgcccagctttacactgactatgcaaaagggcatggtttgattcaggtgacaaacaacataacactgatgaacagatcaaacacatgtaaaatctaccctcatgtccactacaaatactacatctaggtagctctgatttggatatttctaatgtggtcctaccatatggggttgtcttaaaacattcttggatcaaactatacccactcataccatttttcaccttgtaatctgcaagatgcttacagggctttggatttatatataaagagttacttgagcacat

SEQ ID NO: 50 - DNA, 7302 bp, Nicotiana tabacum
atgaaagaacttcattctctaagagagatcgaagggcctgacccgaattataaagatatatgcttttctggtgctggaaggtaataaattaactatagtaatgttagatcattaactttttctttcctttatttttggtgttgtttcttgtattgaatgtcttgtatattgcagtgacatctcagagctctcaaaatcatttcctcctatcgacatggtatttagcaatggaaagaaactatctctcactcctgaaaactacttattcagggtaggcatcttaatccacatggtttttatcttactaccttgcctttagaatctgtatctccttttggcttcatctctcctagtggctacattttttgtctttgttttgataagtggctccattttctctctgtgtttctatattgactaattctgcccttttgcttactgtaactgattgctataaagcactcaaaggtgcgtggggcttactgcttgggaatttttcagaatgggaaggatccaactactcttcttggaggtatttgtcatatatatcttttagaatcttgggaaagttcatctgccaaattcttcagttgtataagctgtaacatgcgtgcctttgcttttaattgcaacaggtattgttgtccgcaacactcttgtaacctacgatcgtgaaaatgaaaggattggtttttggaaaaccaattgttctgagttatgggaccgactaaatttatctccttcacctccacctccaccattgccctcaggcttggacaacacaaactccagtgcaaatttgactccagcactggcacctagtttacctctggagcatgcacctggtacgaagaaactgttctcctatctttttgtcaccattagtatgcctttcagtcatgcttttatccagttttgtagtggaactggttttatttcaattattctaccggaaggggggagccttagagcaacggtaatgttgtctccgtctggcctatatgtcatgggttcgagaagtggaagcagccactattgcttgcattagggtaggctgtctacatcatactcacaccccttagggtacggcccttcccggaaccacatcaatccgagatgctttgtgcatcgggctgtccattataattccgccaggctgttttgcatcatttccccctaatatttttaatccattttggtttctgatttgctatgctggttttttgctatatcgcctaagattaggttagctttgatgatttcacatcctttctttgattaaggtccatgaatgttcctgtgtctccaaatgtcagctttcaaaatgacatttgagcttgcgttttgtattgtttcatcaagttttgtattcatctatctccttagcattccagagttcctgagaagcactcgctagtaaagacgtattctgatgtcatgacatttttaaccttgttggagtttggacccaaacaaactttttttacagaaggaaactataattttaaggagtacaacagttgctgtatatagaacatggtgagtaactccactcttgagatgccttctcttcactgaagtcaatttctaaaaacctccgtgcttgacacagatttgttggtatagatttgtgctccagagatgcagatgggtccagcgaatttttcactagaatttttcttttttttctcaccacctgtccagcatagtgctgtcaaaagtgacaagcttagaaaaaaaccatgtgcttggtggggctttaactgcaacatgctataaaaacgttcactataaatgtaatgtaaataaataaccataaacacaaaatagcaattgttggaaaaattgcaatttagtgaaatacacgaggtgtcaatcaagttcagatcatattgtaagtcttgattcaaggtgcatttttaaattagtaatttggatcaatgattagttttcttagactataactttcaattttcatactcgtaagaactgatatactcatatataatataacgtttttcttaataactaataaatgctttcctaactatatttatttttgtgctatcctattaacaacagagcctgtggatgttaggcacccactttaaggcctttttcctcgcactgaagccctacttttaaggtttactgtcacgacccaaaattccaccttaaggatcgtgatttcacctagtctctaaaactaggtaagtcgatcacttacaacagttaaaccattaaaacatgatattatgaagcggagtttaatataaatgcgaaaataaaggtgatacaagccaacacggcgttaatcacaacaaatccccaagactaggtaatacagagtcacgaactctaactgaatacatagaaatatttcaaaacaaagatacaatactgttctggcagataattgacagtataaagataaggaaagactacaagggacttcgacgatcaagcagctctaccttgaatcctcgtgatcaaaaagctaactctgcctaggtcctatgcctccaacaccttgatttgcacaaaatgtgcagaagtgtagtttgaatacaccatggttggtacccagtaagtatcaaggctaacctcgatggaatattggcgaggttcaagtaaagacactcactagtcaaataacctgtgaaaaatatcaaaaatgggcaaatggaataataacataaagtcataactgtaatctcttcaaattaaacgatacctatttagaataattaaaggtcccgttctgacaataagccatcaaatagaatcacgcacacccggcacctcgtacccacattaacaatcaccctcgcacggcaaaggcctcgtgccacaacataagatatacctcgcacgacgaagagcttgtgccacaatataagtcacaaccgcatggataactcatatgccaatatcacaatccgcctggcgtggtcacatgctcaatatcacaattcgcccggcgtggtcacatgctcaatatcacaatccacccggtgtggtcacatgctcaatatcccaatccggctggcatggtcaccggctacctgtccaaatgtacatgatcaatggacatcaagtttcatactcctggactgatattaatgacatgttatggtatatgcatgtgcaagtgtattatcacagcttaaatcatctaagtaatatcagagacaccaagtggcacattaggaacaacacaacaaatcacgtaatatgtatgacacacacaaggaagtcaaaagcaacaaccagaatactcctctttcatcaacaacatgcccccaggccatcacataacatccccttattgccacccttatgtcaccacgttgacaatatcataatagccacccgtatcgctccgcctaggcagtatatcaatagccacccgtgtcactgcgcgcagacaatatatcaatagccatccgtgtcactccgcacaatcaacaacagtgaattgtcatccttgtgctccggataacaacaatcgatccacacatgtccacatatgccacaatatcacaggatagtagtattagagatttatcacgatacaagctcaccactcatcaacaaagtgcacaaggacatatcattaatatagaattgctgaggggtattcaacatttaagcatgaaagctactcaaattaacaagagtctcacaagcgcccaacttggccaaataaggaattaagatcctaaaacatgatttgtacatggaatataaataacttaatgtcaaaaataacttgatgtcataaataaaagccataggaaacgattctgaataataaagcttctatcttgaacaagaataaaaagtaatcccaaaaagtcaaccccgggcccacaccgtggaatccgacaaaactcacaaattccgaacacccgttcaaatacgagtccaaccataccaaaatcatccaattccggcctcaaatcggccttcaaatcatcaatttatgttttaaaaaagtttttactatgatctccaatttctcccattcaaatcatcaatcaaacactaaaattgagattggaatcatgagaataaacaaatccgagtaaaaaatacttaccccaatccaaatcgtggaaattcccccaaaatcgcccaaatccgagctctataactcaaaatgtgataaaataaccaaaacctttgaaatagagtacttatagatctgctccaggtaaacccttctcaattgcaggaccagcttcgcaatcgcaaagcacaaacttaactgaccacagaaatacccttcgcgttcgcggtacatacctcgcgaacgcgatgcatggctgagccagacctacgcgaacgcggcgtagaccacgtgaccgcgaagacaataccaccagctcccagttcttcatcgcgaacgcgtcattgccatcgcgaacgcattgaccaagccccacaaagctacgggaacgcgaccctccagttgtgaatgcgaagaggaaaaacactcagctccaatcatacactgcgcgatcgcggttagccccttgcgatcgctaagaacgtcagcaacaacagaaaaccagcaacacaacatgaaggaaaatggtccgaaatcaccccgaaactcacccgagcccctcggggccccgttcgaacataccaacaagtcccaaaacatagacaaacctactcgaggtcccaaatgacaccaaacaacatcaaaactacgaatcacaccgcaaattcaagcctaatgaactaatgaactttcaatttccaaaactcatgccgaaccataccaaatcaactcagaatgatctcaaattttgcatgcaagtcccagatgacataaacggacctataccaactctcagaaccgcaatccgaacccgatatcaacaaagtcaactctcggtcaaatctatcaaccttccaaaccttcaactatccaacttttgccggttcaagccaaaacaacctaggagactccaaatccacatccggacacacgctaaatccaaaatcaccatccagacctaacagaaccatccaaactctgatccgagatcaaatacgcaaaagtcaaacttggtcaactcttccaatttaaagcttctaaaatgagaattattcttccaaatcaatcccgaaatgctcgaaaaccgaaaccgaccatacacgcaagttgtaatacatcatatgaagctactcacgacctcgaaccaccgaacagaaatgcaaatgatcaaaacgaccgatcgggtcgttacatttatgtatgcttcaaatgagcattcagtgacactgttcagcaaaaggagaaactctactagccacttgtagccacctccagggaccctctctgtctcggccatggattactttgaggagtaatagggcttctccaagcggaaacattccacgcatgctgtgatcctccatgttttctctgctaatctttgctactttttctggcggtccaactggttgatcaattctactaacaccatccgaatgagccctcaggaattcatctccctacttctttgccagatacaaggaaggcgttgtcctcatagggttggccttggcataactctctgataatttgacacgttgctttaatttggtaacaatttacaattttgggggtgctgcacttgattccattgagttacaccatttctcatatttaggaatggtcctgtgcaagattgaaatgtactgaactcagtttttccctgtgcagatatttatgattgttattattatttcatctttgacctgaattggcagggaaaatcaaaattggactcgtatcatttgatatgtcactgagtgttgattactcagcattgaagcctcgtgttccagagcttgcccattttattgcgcaagagttggaggttaacgtctcacaggtagtttttgcatgacccaaagttgtgtcagtctgatgtaatctaaaactgtatatcccattttctttaagttacttaactgtattttaattttgttcaatatgatatgtcacttattggaagataccttgcaggttcacttaatgaacttttcgacagaaggaaatgattccctcattagatgggccatctttcctgcaggatctgcaaactacatgccaaatgccactgcaacagtaactctaaacatctagaatatgtgaggactatttcttgattgaagaaccctttattcatcatttacctatttgcaggaaataataaaccggttggctgagaatcgttttcatcttcctgatacatttggaagttataaattagtcaaatgggacattgaacccccaccaaagaggtataaaagctatctccattctttgcatgttcataaaatattgagttctgctgtacaaacttttagcatcatagcattacttataaaattattctgaattgtcaaaacaaatgtgccttttcttttcaaaatgcaaaataaatctccgcattgcatttcagatgggaaaaacatgacacgcatcttttcatcttgccttaaacacatgtttgtaagttacattctaaattaggaaacgtgaatgagtctacattgcatcgcaccagttcgactgcatattccaaggataatgatgaataggtgatgactttcgtctccatttttcattgtttcaatttttctcaaagtttcttacttggattggtggataaagtggcaaagccagaatttttttataagggattcgaaaatactagaatgtcataattgagatctgaacttgtgacttgaaagcaacttttgaatcctctttgctactaaactaaaaaatttcccctatggcaaggagattcaatagcttatatataaccaaaaaacttcatttttaccctattcgcatactataatttgaaatgtttttggtcaaagtttaatttgctgcatctcaaaatcttaatagcaaaatattaccttaattaactctaatgtaaagagattggataacacaccacaacaatatttttggtaggtgaatattactttaatttttttgacaattaattgagataggagttcttgatattttttttttggttttggtaactatcaagttgttggtttgatatggtttcattgcaacgatttaggatacgatggcagcaaaattaccttgttgtagtgtttgcgctactagttgtcctgataattggattatcagcttctctgggatggttaatttggagacgaaggcaagaaatcccatataatcctgttggaagcgctgaaacacatgaaaaagaactccagccgctaaat

SEQ ID NO: 51 - DNA, 15451 bp, Nicotiana tabacum
  misc_feature (5176)..(5176): n is a, c, g, or t
  misc_feature (5712)..(5891): n is a, c, g, or t
atggtcacaggtctgaacttccgccataactttctcgtgtcagctttactatactctaaatttgaactataataccacattgatgtgaaaattcacacttaggtatcgattttttaacacagagatttattttgtgttcatgctttggtttcaagtattggagaacctcgtaatcgttctctataagcttctggtttaacagatcctaatttttcttagaagctcgaattattttgtattggaatgaaatgaacctgaatattgtggacgatacagaggaattattgtggtatagttgattgattgattgatagtcttaagtaagaaaaagacctattggagattatggtgaagcttatacaggagcagctggacttggttttcacaatatcttttttgttaaggttagaataaacctgctaaaattttttacttatcaaaataaataaataaacttgctagaatttttttcaagttggtgattgtttaagttttttcgattgttttttcctttggtaaaaacgtttttggcaagaactatattttgaagttgtggtttgagagtgtttgtcaaataatcttttcaaacaaactctcttttcaaatatccgaacatcttcaacttccacgaaataggtgacaactggattaaatttgggggggggggggagtggttgatggtgtattaagttcaaacatcatttatctttttctctaggagcagatttttaaatcattatagatacattgcttgatgtatgtttgagaaataccattggtgtttcatttaggcatcatcactgtaatagtttggttaatgttttgttaattcatcatggtggttcattcagacagcatcattcggctatgatgttgatgttgatttggttacacaagcaactcattggtggaaacagttttctaggataccccttttatcattttcatttgattgtacctcctgtttatttttgcacttggacaattacgggctacaattctctccttgcaaatctggtgattggttgcagtaagtgtaaagtggcaaaaagaagtctatcctgctgtggaaattgacactagccagcctccatatgttttcaaagcccagctgtatgatctaacaggggtaccacctgaaaggcaaaagataatggtcaaaggtggtttgcttaaggtataaaatttcgtttcacttagcttgttatgccatttttcactttgcaaataaagcacaaaactcatttgtgttttgaggaacgctgaaattctcagcatctgatgctttgcttgttaattttgttgttaactcttcggttatttctatggttgtttaggacgatgccgactggtcgaaagtaggagtaaaagaggtacacggctactcattgaattactctctatttttatgcaatgaagtgccaattatctagaagcatctgttatttattatttccagggtcaaaggctgatgatgatgggaactgcagatgagattgtgaaggcccccgagaagggtcctgtttttgctgaagatttacctgaagaagagcaagtggttaatgtagtaagttttttgacactgatgttgttgcatcaaatcgaatgatccggagatgtgtgattccttatgtttaactgcttacatagttagtcttgtctcatatgctgtacttataccagcactggatccctagtagatttattggtataactttaccgcaattgctttgttcattttttttcaaaagcagttgccttttccaacttctacatgcaaataagctttaatatataattctctattctttttccgctggcacaagtgattttgtggatgccaagcgcttgtcgaatgcgtttcttgttccgctggcacaagtgattttgtggattccaagcgcttgttgaatgcgtaatttcttcatttacacattatgaatcggcccttcccaagaccccgcacatagcaggagcttagtgcactgggctgcctttttacacattgtgaatcagattactatgttgttttagagtcctgtctaaaagaactgctaacttttataatggcaaggcttagttttgtacttttaatcagtaaatgggtgatgagaatttttataattttgtttcctccagggtcattctgctggattatttaatctcggaaatacatgctacatgaactccacagtacagtgcttgcattcagttccagaactgaagtctgctctaacagagtgagcatttgcttctttcatcctttccttcatttttgggagtcttttggtttaggcttttttttggtccttttgctttagccttgatttcccaaaacttgatcaaattcaatatggttgcttttaagtctagttctgaaaatatttaggtctattttgattgcgttgcacttttttggttaggcaattcgatctatttgcacctaatccgtaattcctgtttttgctaaaattgataattctgattttactgtttatatttgtcaaatctattaatcataatttaacttatataatgtgtcgcgttgtatacacctagatagtatgtatttacggagacaaagcggagaaaacagtaattagtagaggagacataaattatcctgttttaattcctatatatcctcccttatataaatatggactcgtttctcggcatgttctcctttggatgaaatcaatccaaaatgtaatccactttgaatcaatttggactccgaaactgtggatctttcccgaacattatcagaaaaaagatcaaaatggctcctgttaaataccaagtgtaggagttccaaaaacaactccgttaggtacatttctttttgtgttcctgagattctgagtttatttattcttcctgttaggtataaccagcttggtagaagcaatgatttggatcactcatctcatctcttgacagttgcaacaagagatctgtttaatgacctggataaaaatgtcaaaccagtggcaccaatgcaattctggacggtactttatttgtctttattctactcctaatatttttggttacgacttagtattcctgactttgtattcttagaaaatgtgtttggatttcgaacaaagttaccatacctttgaaggagaatacgtatgctgagtaggagatagtgtttgccaataatttcctattggcagacttcaaaatatactcgtttagcgttgaacactgaactcgatatattttgtcatgacttttgtgtgcaaatggatttgctcttagagagcaaggatgaagtactttgtataggatgcgaatagaatgacttaagcttgggcctgttgtctacatggtcaaaactttgtgcattatcattcttgcacaaggttacttggatttatatgagaactataaatgtagcctatgttgatatgtttgtctttttagtgttttcgtcacatgagctactcgggcatcaacatttgattaggtttatgttcacaggttttgcggaagaaatatcctcaatttggccagcagagcaatggagctttcatgcaacaggttccaagcttacctaagctaccacaatgcttccttgttattaaaaaaaaaaaagtgtaccactattgcaattgctatatagaggtcctactgacatgtcctggataataacaggatgctgaagaatgttggacgcaactactttacaccctttctcagtctcttaaatcaccgaactctaggtactacatctcctctcgggatatttcttgcagatgaaagtcccttttctaaataatttccatgttttgtttcgctagttgttttctttgtttcagtttggacatatggtccctattttgtaaaaatgtgaaggaaaactctcctatatatacattgtgcttctttatgtcatgattgtgactgctctttatctcggtacttgcagtggaagtccggatattgtgaaggctctcttcggtattgagtttgacaacaggtatttctgcagtcaaatgttgtttaccttccagttattctgttaccttatcccctttgcatagagttgttctgcacctaaatattataagaggcatgtgaacttactgctgtatatgtattgagataggaaggaatgcagctagtggtcctaggatgtaggatgttccctgttctgactttgagtatcttctgggcaacctgatgagaatcaacatcctcaacttttactctgtcatattgtgaatcatgtagttgacaataagagatgaattactgaagttgttttgaaagttgaagctaaaaatcatgtttatgttgacttcttttagtttctcctactgttagttaagtgtactatagtgctactagtgtgtatttgtattactgctaatgaaaggtctggctggtttatgccgttctagggtattttcaacaggctgtgcttttctgctgtagcctagacctctgggctaatatttcttgtctaggacctgacctactgcaatgaggttgggaagatcccaatgcccatcccagagttctcatgtgctcaaattcatctactgatatacaaaatttaattttcgatagtgtgggaagctgtttatcattcatgtctgacttgatctatactgttctgactggattatggtggttgtgctagagtccactctgtgactatgttccatatctgatattaactgctagatactgaagaaaaatgacttaactctgccccttattctcatggtactgatatggaccaggattcattgtgctgaaagtggtgaagaaagcacagaaacagaaactgtatattcccttaaatgccacatttcacaggaagtgaaccatttgcatgagggtttgaaacgtgtaagttcggttcttttcctccttgtatgtcccaacttctaactttagtcttgtttcctcccaaatgtttcatattactgctaagttctgtctcaattttttctgttgtgccaatccagtaatcatccaatttgattaagaggacagtcccaaagtgaaaaatgacgtatctaattcatagaaattcctttggtagctgtaacctttaaggataactaacagttagtcctgaaatggttggttggatggagaaactattatataagatgcctcacgggcggcacattggggggggggggggcttttnggggggggtcttttgctttagaattttttcatgccatgattggaccaaatgtggggcctgcatgttgaggttcatgcaatagtttcacatcagaggtaggctgagccattggagccgactcataatgcttttggtgggaaaagatgctttggagattttgtttaacttggtgcaaaatcgttgatgatgtttatactggaaatctggtatttatcccctcaaaataatttaaatgcactcatatggccattgctttttctgacagggtctgaaatcagaactggagaaggcgtctccgtcacttggacggagtgcagtttatgtgaaagactcccgaatcaatggcttgccaaggtattaactggctcgattaaattccatggcgatgtagcgacatatgtatgatccgtagcttctgcatatagactatcttaatccacgcctttcacataacaaaaatgccttttgatgtgttgaagtagttcacctcatttttggcatcacttctttctcattctcctttctttttttttttnnnnnnnnnnnnnnnnnnnnnnnnnnnnnnnnnnnnnnnnnnnnnnnnnnnnnnnnnnnnnnnnnnnnnnnnnnnnnnnnnnnnnnnnnnnnnnnnnnnnnnnnnnnnnnnnnnnnnnnnnnnnnnnnnnnnnnnnnnnnnnnnnnnnnnnnnnnnnnnnnnnnnnnnnnnnnnnnnnnnggggcttttaattctcacacttttctggatagtttctttactatttggtgctgattattgactggtctatgtcaaaatcttcttctatttttactatttctttttcatttgatgaatagatacttgaccattcagttcgtccggtttttctggaagagggaatcaaatcaaaaggcaaagattttgcgggtatgttgacttactcatcttccttttcacattgatcaaatagttggtcctccttgaaaatgtgtcggaagagggaaaaaggatcaggttaccatgtcctgaaccgagaaagggggatggagaaagggagttcactgttttactttgttttgtgaggatgagcggttctgtcatgtttaggtgctctaaagtctcgcctattctctcgattgtcaaattctgaactgtatattttaactttaggctggtttgtgatggtgtcggtgtaggagtcttggtctataatcccttcccaataaaaaattaactgaaacttctcttaagtttctaattgatcttggagtaggtgtaacttgggcacaattacaaagaggagttcttatgcaccaatgactagatttcagctactagaagtaagaagtaagagaaggatgtgatattaatactttgctattctagtgagatagtatgtacataatatttttttgaaagagagttctggtgagaagctgatatgtttttttttcttttttcctttgtgttgatacaagatcttcttaacaatcaaaaatatctgaaaagctttttcctggattcggccattcgggataataacccacccattgccataagttctgggatctataaagtagttgtactgggtgtttcagatatctttgtgtttgtgagaatgcacaggagaaatctattctattgattaaagtgttgtacaaccctatttatatacagtaattacataataataggtatctacttcccgatgtgggacactataatacgagaaccagtaagagacttagtgaaaatatctgctatgctagctaatcattctactttacaaactttgtaacaatatctcctgagagtatcttttctctgccaaagtgacagttgatctcaatgtgtttagtcctctcatggaacaccagatatgacgcaatatgaagagcaacttgattatcacacgccagttccatcgtgctgatttctccgaacttcaactccttaagcaaccgcttgatccaaactagctcacacgttgccacagccatggcccgatattcggcttcggcgctagatcaagcaactacattttgtttcttgctcttccaagacaccaaattacttcctactagaacgcaatatccagacgtagaacgtctatcagaaggtgatcctgcccaatcagcatctgtgtacccaacaatctgctcgtggccttgatcctcgaatagtaaccctttgcctagagctgactttatataccgaagaatgcgaacagctgcaatccataactgacttacaacactcaccggaaaagaaatgtcaggtctactcacagtgaggtaattcaatttgccaaccaacctcctatatcttgtaggatctctaagaggctccccctgtccaggcagaagcttagcattcggatccataggagtgtcaaccggtctacagcccatcattcccgtctcctcaagaatgtcttaaggcatactttcgttgtgaaataacaatacctgagctagactgagcgacagtctcgaagtgctgaaagagttgctgcttcagattagtaataccatcctgatcattgccagtaataacaatatcatcaacataaaccaccagataatacacagattaggagcagaatgccgataaaacacaaagtgatcaggttcactacgagtcatgccgaactcctgaataattgtgctgaacttaccaaaccaagttcgaggtgattgtttcaaaccatatagtgacctgcgcaatcggcatacaagatcactagactccccctagcaataaaaccaggtggttgctccatataaacttcttcctcaagatcaccatggaggaaagcattcttaatgtctaactgataaagaggccaatgacgtacaacaaccatggacaagaagagacgagcagactttagccgcgggagagaaagtgtcactataatcaagcccaaaaatctgagtgtatccttttgcaacaagacgagccttaagacgatcaacttggccatccgggccgactttgactgcataaactcaacgacaaccaacaatagacttacctgaaggaagaggaacaagctcccaagtgccactcgcatgtaaagcagacatctcctcaatcatagcatgtcgccatcctggatgagatagtgcctcacctgtagacttgggatagagacagttgacaaagatgatataaaagcataatgaggtgatgacagacgatgataacttaaaccgacataatgaggattaggattaagagtggatcgcgcacctttccaaagtgcaatcggtttactaggaagaggcaagtccgcagtaggagcaggattaggtgcaaaacgtgaatcagctgggcctgatgctggctgcggacgacgatgatatgtcaagagtggtgttcctgtggcggggaatctaggaggagtctgtggcgaaaggtgaaggaggagctatagtaagctccttaaaggtcgatacaggtaagacctcagatatatcaaggtggtcagaagaggtaaagaaaggtttagactcaaaaaatatgacgtcagatgatataaagtacttatgaagatcaggtgagtaacaacgatattccttctgaacacgagaataaccaaggaagacacacttgagagcacgaggagctaacttatctttcccaggggctaagttatgaacgaagcaaatgctccctaaaacacgaggaggaacagagtataagggtgattggggaacaatactgcatacggaatctgattctggatgggagatgaaggcatccgtttaaccaaataacaagctgtgagaactgcatcaggtggtcagaagaggtaaagaaaggtttagactaaaaaaatgtgatgtcagatggcataaagtacttatgaagatcaggtgagtaacaacgatatcccttctgaacacgagaataaccaaggaagacacacttgagagcacgaggagctaatttatcttttccaagggctaagttatgaacgaagcaagtgctaccaaaaacacgagaggaacagagtagaagggtgactgggaaatagtactgcatacggaatgtgattctggatgggagatgaaggcatccgattaaccaaataacaatctgtgagaactgcatcgccccaaaaacgcaacagaacatgagattcaatgagaagtgtgcgagcaatctcaatgatgtgcctattctttctctctgcaaccctattttactgaggggtataagaacaagaggtctgatgaataattccttgagaagtcataaactgctgaaattgagaggataaatattctaaggcattatcactgcgaaaagtgcgaatggaaacaccaaattgatttttaatttcagcacaaaaattctggaatatagaaaacaactcagaacgatctttcattaagaaaatccaagtaatcttgaatgatcatcaatgagactaacaaaataacgaaatcccaaggttgaactggctctactaggaccccatatatcagaatgaactaaagaaaaaacagactctgcatgactctcaatactacgagaaaaggtttgggaatgttttccgagctgacatgactcacactataatctagataaactagacaaactaggcaccatcctctgaagcttggataagcttggatgtcctaaacttatgtgaattaggtccggaggatctgtagctagacatgtcttggaggaattgagtgagttaaggtagtaaaggccttctgattcaagtcatgttccaatcgtctgtcccgtactacggtcctgcataataaaagaatcatcaataaaatatataccacaatggagggcacgagtcaaatgactagcagatgcaaaggacagccagggacataaagaacagaatctagagtgacagagggtgggggatttgcttgtccaactccttttgctttagtttgagacccattggctaaaataatagtgggaagagactgtgaatatgcaatatttgacaaaagtgatttattaccagagatatgatcagaagctgctgagtccacaacccattatccaagagtactagactgggaaacacaagcaaaagaattatcaacaacagaagtatcagtctgagcaatagaggctacttgtggagatgtctgcttgctcgatacggagggaactcattatattccccttcaaataaagaaaatccctggttacctgtagtctcggtctgagcaacataagcatttttgagtggacgaccttgtaaagaatagcacacgtcacgagtgtgtccaagtttatgacaataagagcaattgggcctagatcttccaaaacgaccacctcctcgtctattctccatagtttgagatacctgattgtccactgactgggatacgagaacagatgagtcaagtgtctgtgatgagcttactaggtgacttggtattgcagcaaggcgaagtaattgagagaataattcatcaacattggggacagtcggactagccaaaatctggtcacatactgaatcaaggtcattagggagttcagcgagtgtaagaactagaaacatcttctgtcgttgctcttgttgcttttcaatactagcagaaactgacatcaattgctcaaattcttccatgactgcctgtacttgtcctaagtgtgtagacatatccaattcctgtttcttcaagcttgtcattcgcgatattacatcatagaaacgagatagtcattagtgtataaagtacgagccttctcccaaactaaataacatgtctggaatggatggaacaaaggcatcaacttggaatcaatagatcgccacaagatactacataactgagcatcgaccttctcccaaagtgttttggccttttcatcaccgtcgctagccctttttgttaaatgatcttgaactccttgacctttacaccacaactcgacagacgaagcccaagctaagtagtttgaacttcccattaaaggttctgaggcaatcataataccataacttccagaacccgtgtttttagacccaaatacatccactcccaaagacattattggattgaaaagagatctagcaaattagcaccaaataaaacaaagaatcaactgtggttgccgaaaaactgccggaaaaaatactgtagttgcaggaaaattttcaaagtgctcggaatcaaaaaataaaaatatgggaaggctcggaattgcagggcgatcagactgttctaaagaagttttctgaaaaaatggacggaacgggctccacgcgccggcgcgtggagtagatcttgccggcgaaaattgtcttcgggcggcgcgtgaggcggagtctgacggagttgtttgctggggtttggtcgccggaggttggggaccttatggtggtgttggtttttgcacaacaccgatggaattggttttgacgaaaaaatagccctaaaaggtcaccgggatgaagcacgtcgacgactgggttttcattcccggatgttttctcactgccgctctgataccatgtgagaatgcacgggagaaaaatctattctattgattaaagtgttgtacaaccctatttatatacagtaattacataataataggtatctacttcccgatgtgggacactaaacatgactaactacttaacagtgttgaacatgggtaacccaggggggtcttcacctaattccaaaactgaagtgaaaagaggaaaaagaaagcaggcttgtgaggttccgcgttcctctccatctgatatgacctttctatatatatatattcttttaaatgatgcttcccggctagcttatgcgcacctcgattattctatttagtacatgctacctcccatcagaacatgcacaaggtaactctgtccatcaaggcttaggaaaatagaagaaatcacctactctctccgttccaatttatgtgatcctgtttgactgggcacagagtttaagaaaaaatgaagacttttagaatttgtggtcctaaacaagtcaaaaaggggcctagattatttgtgtggttataaaagcttctcattaatagtagaattgtaagtttaagctaaattgttaccaaatttagaaatgggtcattctttttgaaacggaccaaaaaggaaataggttcacataaactggaacagagggagtagtattttttgtttccattgggatttgtgattgagatctcatggttatgtatgcatatgttgtgatgtagttccatatctttactgtttagatggttgacagggaaatagtaagttcttttttaacttaattacgaaaataaattgtcttcttttatttaagcttatgtgacattatttcctttttagtttgcttataaaagaattaaccctttctaagtttggagaactaaatgttctcattttacgcttaatggcaagcatttatagccacacattcgttctgcatatttaaaacctgaagtttcaaaagtcttatttaaccatagcatgtttaagactacaagtttcaaaagtcattcttttttccttattaaacttcctgtgtagttaaacaaggtcgcaataaaatgaaatagagggagtactatatttaagaatggtatcatacttggtagtttttctcttctcgtctctccttttttgggtaggggatgcatcaagctgtaggttcaattgtttataacttttaaatagctaaagaacttgctctagtagtgatttcgggggtaagataatctttgtggttaagaatccattgaatatgggaataataaaaaaaaaaaaagaaaaagaatgcattggattagagatcacaaccatttttagccgatattggctgcgatgtgttctggctaattttttcttgaaaggtaacagaggatcggttctggcgaattaactaaggttcattttaaatatcacccatatccaacctagccacccatctgtcacgtataaaacttattgtggacaaaaatagaatggtcacttccttttccacccaccgctagttgcgacgtgacaacaaggagttgtaaatgtgatgtgatggattttagttatagcaggaacttaaatgataatctaggaagctacaattttgctatgcttcaaacaacagtcatatctcgtattaaaactcagcaagtcttgcttttttagtaatataggtttgctaatatttcaaaatcctattttatattttctgcatgtattggatctctcattgctttaagatataagaaatggtaatcttaaactatgtctatgccatcagaaagtggattacccgctgtcgttggatgtatatgatttttgttcggaagaccttcgcaagaaactggaaggtcctcgccaggtactgtctttttcccattgatcaatgtcttttaagaaatgaggaaagaccagaccctctttggcccctctttctctttcttgttctgttattacatgactctaaatttgctgctaggttttgagggatgctgaaggtaagaaggccggtttaaaaaccagtgagaaaacttcaagttcaactgacggcgacgttaaaatgactgaggctgaggtatgaattaatctttgtaatgtaggagtgacttaaggggataaagagggacctttcgggcccacctatggcggattgtacaaggtggtttaaagtgggaaattaagaatgtctataagtaacttctgccttttctccttttttttcctattgtttatgcaggaatcatctagtggaagtggagaagcgtctaaaacaacccaagaaggtagagaaacacctccttttcttgataacttgatgacttgataaacatatgctgctgctgtattttaattggtaacaatgtctggcattaaaattgtaatatttgggagagaagttattgtcatgaaattaccttccaactcacatatccttttcaatgctttaaatgaaactctgttagttaattgtcagatataattctgcagtaatattgcggttccatgaggttttacagttcttatgacaacaatgttctgccctgggtattcaaacttcttttcacaaagtcactgttagtatctttgattacaagcgattgaccttctattaacaattttgggatcccataaagattattaacttggatcagatttattcctttttaaattactatatgtccctagacaccggcggacgtttgccaagtttcttttgaagggggcgccttttaatttttagaactatggaagatccttaaggtttagctctgctgatacaagtacattttaatttgtttggacatttgtttgtatgtagaaaatgtagagaacctctagcatagataaccccgtacttgcctttgaatttatataactacgaaagattctaaaggtttagctctgctgatacacttacattaagttggtgttttctcggagtcctttaatttgtttagacatttatttgtatgtggaaaatgtagagaacctctagcattggataaccccataaattgtcttaaaagaaaattttctgagtattggaatgaactagggcccagatggagcagaatgaatgtcggggattaaataagggactctaactggttctggattgggagcagtagttgtgaatgatcaattttatcaacagtttagtgtttctgatatataaggggaagttagtctaagagctcaattttggaattctgttatgaatgaggagtcgcaatgattagtgcttttttttttttaatgatgcccgattagtaaactccatttcaggtgttctgcctgagaaggaacaccacttgactggaatatatgatttggtggccgtgctgactcacaagggaagaagtgctgactctgggcattatgttgcctgggtcaagcaagaaaacggtcagtttaactgggaagagattttgttctagtaatcgttgctcttggactaccatctgatacaatatattgaaaatctctttgtaaaccacaggaaagtgggttcaatttgatgatgacaatccaattccgcagagagaagaggacatccctaaactttcaggaggtggtaagtgaatcacttgtgtattacgtcttcggcaaattttcaaagtctggcaagcatatcctttcttataacaacaagatgtaaagcagatggaatattttgttgcttgtgtgcctgaatgtgtttttcgttctgtcagtttatagaagtgctttatttttggtttcaggtgattggcatatggcttatatttgcatgtacaaggcccgtgttgttcccatg

SEQ ID NO: 52 - DNA, 5734 bp, Nicotiana tabacum
ctatttcacttgatgcaaggaaaattgattactcctggcactacgaagaaatgtttggttaaaaggacaaaggtcagtgcaaaaaccagaatagttcattgctacactaggtccaactagccagatagatgcacacaatttgcggcagagataactataagacaccacagtgcttaactgccttttaaccaaagaccaaaaacactcatgaagaagaaaaatgacaacctttttatagctatggactgtccatttcatacgattccagttgttaatactttatgcatgagtcaaatagaatttgcatacaaaaaaataggtccatttgcaacaaatccgagtataactgaatgaacagatgagagccattaaaaccttaatgtcaaatcctacaaaacaattggatcatctccacaatgcatgacgtaattcatctcatgctgtaaatatatcagtctgtggttaatatgaaagttatagattaaagattcacaagacacaaatgtgcctcctgaacttcctagagcagcatatcagctaaagcaaagaatagaaatacactaatacagaacagcaaagagagacttaatagacctgagttccatattttcaatgcggatacgttcaacatataagtcatgatcttctgcttcactgttgatctcatcgtcttttttgggatcctttttgcgccgtgaacttgatctcctcgaaaatagtctatcaatcctggcagcataagaacctaagagtgctaagacacaatgcattcactaaaacattgaaaaaaggcccaaaacagaggcaaagtggagatgaactttagaattctatcttcacattttcaccagaagggttcagaaagttataggaacttcatttcaagtacaatgcaaacagtaaacaggtttttactatactaaagtatctaaaagtcacttaccttgtttttctcaaaatccatgcccaagtgcgtccaataatcatgtccactttttccatgaaaaagtaatcagtagtcctatcaattccaatgccgcgtcgaaagattacatactggaaagaaaaggtacgtatatagagattcagtggcatgatcaaactcttgactctcatccttttccctcgagaaatatatgttcatattacacattgatatacttaataaatttcgaggtaaaacattgatataccatataagttgaacagctcaaatacaatataatacatccatgatactatttgcaggttcaaaaagatataagtgacaacacgtgcacaagtcactctttacctttgttgaagcttgtgtgcactattacaggtttgaggagcagaccttgaacaatgattaatcttttgaaaactagcaagaagatgagaggataaagattccagtttgtgctcagtcataacacacttttttgaatccgtggtgaaaataaaaatctttcatcaaagaaaaagaagaaagggccagtaagcacaatataactctaaagttcttcgcaataaatgatcgcatacttttgcttgtgttttattggagtgcaaattccttcttgccaaaatcatgggcagtaatggacatcctgacacctaagagctaatgttgtatagggacagtggttacttcaagattcactttaaacagccaatcatacttgctgcaaagcaacaatgagatagggaaataaatggacaccatatgtggatatcaaggattcaagtcgcattcttgaaccccaaacaatgcaaggcaccaacaaaaagcagattgggaaatattcaatttggtgaaaatttcataaatacaaccagaagctacacttgtcgacctagcatctgggagccattaacttcataccaaacgttccagcaaaagtaaaggcctcatttcaaattgtaacttgaagctacactaagagatataccttgtcagcaaactctggaaggtcctcatgaggatgctctgcaaaatacttctctaaaagttttttgtcaagctgcatccaggaaaaggtagagtgaatcgcatagcgaacatgacaaaatggaactatatcaagagagccaataattgtcggaaccaaattatatgcggaagcagctggttaagaaccttagattcatcaacagtgattggaagatttagaagatactgtcctgaatgtgcaacatcaatctcttcatcactagctattttaaaattgcttttgtgcataatctgcatcagcataagagaaatgatgatagaaagtggagaatgaaataagggtgccagaacacaaatgtcatacccatttcccttaatcctccagctagatgtggaaaagcattcagaattcactgcacttagagtttgatgcaagtttaaaatccattacaggcttggcctcaatagcatgataatgcagtgcaaaataacggaaaacgactttagcgataaatgaataatatatagccgttccccatgcttgaaaataaagaaatatccccttccatttcgattttgcaacaaaacagcataaatatgcgaaactttcttattgtaaggctactccttatgattaaaaatgggaagcatgtgttagaaaaaacaaagtaaaagagaaaaaaaacaggaaaatgaaggacgaagcaactcccactccctgaagacaaaaacctcgacctcttacctttcacctcactggttgtctccctcccctgagaaaaaacaattattcgctatgtcccaatttatgtgatgcactttcctttttagtatgtcccaaaaagaattataccttactatatttaaaaaaaaattaaaactttccattttacccttaatgagataatctatagccacaaaaatatctatgacttgtttagaccacaagttccaaaagctttctttctttcttaaattttgtgcccagctaaacaacatcacataaaatgggacggaaggagtagtttttcctctcaatttaatccaatagaattttcttccatttcagtggagatcttacacttaataactgatgcaggattatatcttttgttatatttttatttcctaggctcgggaaggagaggatagcatgttttcacctccgctggggattttcttttgaaggtacataaatgtcagggccctcatacaagggttgtagatcgaaagtattctaactatcttctttttttcgggtaaattgttgagccatgggtacacacatacacaaatatatagagagagatatcttcatataagcaactgcagactataaatatgcacacacagaagacagatatgagattggattttttatcaaatttaaactggaacaccaatatcccgactaaagatacgcggatacaatagaatatagcagctgatggtgttactgaaaggtccaacacgggtgctcaaagtccacttgggcaaatgcggctagggagtcagaaagaatgagatgggcgacggacttgccctactgtcagagctagtggtgtgttcttgagatgaaggcttagcattcaccaccttccacgtttccgactttctcttatttgaactttttagatcagtcaacttgagtaagcaacttgggccaagggatgaaactcaagtctctagctctcaagtatactgagtaggcaacttgggcttgcatgttatacatatttttttaactagtatactgagtaggcaactggggcttgcatgttatataatgaatccaaacagcccatatagctggctcaggtaccagaggaaaacaaactttagatgaagctgcagattttttacctgaaacaaatatgtcaagaaattctgttcaagaatgtcaatctcttctggagataacttctgttgttccaatttcttagccccgttcacaggatcaaacaaagagtataattgctgcaatcagacaaatattattgatcaaaacacaatatcaacatcagcatattatattcatttgcagcagactgatgagaaaagatgtctgatcaaataaaaagtagcataagattatattaccatgagatcctcaaattgtagaagataccaagcatgaattgtgtactcaaccctcttgcaaagcttcagaaattcagcccggtcagaactatgttctgggcaaggaggaaggtcggatcattagaacctcaaaaaagacttttacttaaataaccaatcataaaaaagcactaaagggactagaagcacagatattcatgcagcattttacagtttcaagaaaagtagattttctgaagaagaaaaaaagagtggaaatgagctgccaagacgcagacatgatttacgtatatccagaaggaaaacttgtttctgttaaaaattctaaacatataacacgtcaaagcttatcagtgaaggaagggttttgaaaccttttggggattttgatccatgaccatcaagtgtctccgtaaaattcacatggagggtgtacagggtccccccttcttttgaactggggtctcctccttttgaaatgtccagcactaatttactgcgttgtttttactgtgagtaatactgttacttatctatccaaaaaattacatagagggaagtcgtttcaaaagcttacaatttcttgaaatccatgaggacttgatgaaaagatggaagcctttctatttcggttagagtttatatgctcgagtgaccgtgtaaggagaagtgtaagatttagacaattcacggttatagagaaacccttatttgtcctaaaagacaatttattgagtagtggaatgaaacaagccaatggagcagaatgataatgagaaaatcacataaccaactccaactagttatgaatcagggtggagttgcaaaagtaaaatctctattaagcatctaatttcttaaattcaagagattgtgaacttctgagttgagtgaaagtgacttactctaagaaagtatttaatgataaaactcgcaattgagataagtcaaatggtaaaccttggaaaataatctaatttaatctgggaaaatatctaattcacacaacagtaaatctaattaatctgggaaaataatcaaggtcaaattgtctgctttgtcacaatacaattagagtgcctcagaaaacaacattaaattttgcaaaattaaaccattaagggggttgctgtttacacgaaaaaagctaaaactcagacgtcaccaaaactatgagatcgtgtaaagttagtaacattttaggtttaaattcatggcacgcaataattgcttgacattcaggagaaagacaaaaaagtgactgccgttccctatagagtctagcgtagaaagttgtattatttgcttcaaagatctcctcttggagaaagaagcattgtttccttacactgccattttctatggtctagtataggaagttctattgtttgctttaaaagtctcctcggattatagcagagttgtacttgtgctagtcaaatttggtagttttttccacagaagtaacagaaagtgaaaatatcagagatattatccaattaaattagaggagaagaattgtttcaaaattcaaacaactgatcgaccacaaaatagagagggaagaaagagtagccggttgtttgggagcatccaatttttacctataaggtcggcgagggccatgatgagcctgggtttgaggactggaataacagactcgcgctccaaacggatcacctctttcttcttctccat

SEQ ID NO: 53 - DNA, 6170 bp, Nicotiana tabacum
tcaccggtttgtgacaactggatttccgttcgcatcagacaaatggatactctgggttgacttgttagcgacaacaggatttccagactcatctaaattaattatagcaacatcaccaggcttgagatccccagaaaggaaagattcactcaggagatcttcaaccatttgagtaacagccctcctaagagggcgtgcaccgtagtttctgtcaaatccttgttggcatataagctccattactgcttctgacacctccaagcttatttccaatgaaacaagcctagccctcacctcctgcagcatcaggtctagtatctggagcatctgaaagggaaaaaacaaagcagttactcgcagtagccgactgctttctaaagagatgtgccagaataaaagatcaccccaatgtacattcagttatcagatcaatgcaactttccaaatcaaacaagaggtatattatacgaacctggggcttctctagaggacggaatactactacttcgtctagcctattcatcaactcagggcggaaatatgtcttgagctcttccatcactattgctttcataccagcataggaggctgctgattcatcatcagcaagcaagaagccaatagtattctgtctaccctttactatggctgtagaacccacattagaagtcatcactatcagggcattcttaaatgacactcttcttccctgttgaatcaagtttcataattatcaacgccaatcttccaaaacaaggtttacaccccatattgtggaacattctagaacaataagccagatgtaaaaacggatctaacctgagagtctgttaggtgaccatcttcaaacaactgaaggagaatattgaatatgtcaggatgagccttttcaatctcatctagcagcactacagtgaagggctttcttctgatagcttcagtaagtgttcctccttctccatagcctacataaccaggaggcgatccaattaacttgctcacagtatgccgctccatgtattcactcatatccaatcttagcatggcagattcctgtgcaacacaaaaagatacttcactgagtacatagaaattcacaaaaccaagtgattgttaaactgaaacagaaccgaagatagcaaatataactctagcaatttgatgatgaacttctaagaaaagtagatgcataactcttgatgatgaaattctttttgataaaatcctagccacaattttcatctagaaggttgaacagagaatgtcgctcagatgaatttgatttgattcaatctctgcactgaagtcacaaaccgtctacgaccaagagatccaaattcagtgtgatgacaagattaaaagcagcgctaactatatgactatgatccattatcaaagctcacttagtacttttcatttattttgccaaattacgtgcctccaccataggtgattagagactccttctgttctttcttttggggcgggctgagaaggggtggaaggtgcaaggatctagtaaatgtaacagacttatcagatatatatacaatggttgacttcatttcccattgaaatggatgaaggaataatctgatcctggcaacagggaaagagatttgaaataagccagtaatagagcactacctagtacctagtatgtctaaacttgaagtacttattagtgcccaccaataatcagaagtcgtgctccaacaagattaattggtggtatttccaacgctacatttgaccatgccgcaatagccatagaaacctagaatggacacacagcacagcctccggtaccctttccttctctccttttgtttttattatgtgtgtccgaccacctaaaacacagtcaccacatcttactatcatagtataatactttctttacccgaatcaccactaccaacaacatagaaaattcccaagaacaccagaaccaaaaaaagtcctgagaacaccagtactatcaccaaaacctatccattgtcactgaagtggctggattgcataacttcagtggcaaaacatggtgactgtctggtgaaacaattaaggcatctagaatgaaaagatgaagcacatttcttatcttacataataattcttctcaaatttagacaaactaaaaagagcaagattgtgtttgtgcaaattatgctgccagaactcttggtcaacacgattcaatttcagagttccacaatttctactcaattgcttaatctggagacgcatctttggaggaataatgcaaaacagctcattttattaatacttacagaaccaaaataagacgctgccaaagctttagctagttcagattttccaactccagtaggaccacagaagagcattgccgaaattggtctatttgggtccttaagaccagttctagatctcttaacagcccgacaaatggctgcaacagcctcatcctgaccaacaaccctttttttaagctgctcatcaagaccaaccagaagcattctttcatcaacagtaagctgcttaaggggaatgcctgtccagagtgaagcaactgctgctatttcctcaggtccaactaccggaggtctagagtaaaaatcaaaggatttaagttaatttacttctgatttaaatttatgacttcagacaatctttattctactataatgcccttgtaggaacatggaggcagatacgtactcatcttcatcagatgtagaaggtgatgctggctgtaaatgaagttcactgccatcattcaaacgagatgcatcatcattttctgtcagcttgcttgccaagatctgtttatggagggggcacaggtaattgtatttagaccacataaggaagttcaaatttttcaagacgtgcaaaatctagagagtttgtataacattgagtactattaccacttcatgcatggcttgaacagctctaatctcctgccaataatcacttggtgattgtgagagtacagatatctgctgttcctttcttcttttgtgagcttgcatacgagatttactaccagcctcatcaataagatcaatagctttgtcaggaagatacctatccggtatatatcttgctgacagttgcacagcagcatttatggcttccaaactgtatatacacttatgatgtgactcatatttctcacgcaatcccaacagtatctggacagcatccgcctatataatttaggaaacaagaatatctgttagggccttagacacccacttgagcatacacatgcatagagtattattcacctgacttggttcattaatcaagacaggctggaatcttcgggcaaaggccttgtccttctcaatatgcaatctgaactcatccatggtggtagatgcaatacactgttacaagaacaaaatttaagcgcagagtccataaaagccaacattatgaatgcaactacatggagtaatgcatggaaccagaataggaaattacctgcagttcgccccgcccaagtgctggctttagcaaattagcaatgtcaagaccagaacccttatttccccttccaactgtaccagcaccaacaaggatgtggacctcatctatgaatagaatgatattgcctgcaaattatgtcacaagctaagccaatgatctaagaatttgaccaaattttacttccattctatgctcacctgactttttgacctccttaattaatgtagtcacacgcccctctagttcgcccctctcctttgcacctgaaatgagtaggccaatgtctaaagacattacccgctttttctgtgtatatagcaaataaccactagttaagtaggtgcagcagctagtggaacaagagtataggagatgcatattaaattacaaaatagttcaaagaatccctggaaaaaaaatgaattcattgaaaagcccaccattaaaaatgcaggaatatttccctcagcaatgtttatcgccagcccttcggctatcgctgttttcccaaccccagcttgaccaagcagaataggattgtttttggttcgacggcagagaatctcgataattcgctgaacttcaatctctctgccaattactgggtctataaggccctcactcacacgggcagtaagatctacacagaattgctccagcgcatttttctctgctggaaatgaaatgcatttgagacagcgtgccaaaccaaacactaacaagagagaggaactggccataccttttgctttctcagcggatctgtcgatagttatttttccaggaaaggatttctcacgcgaccttttgaatgaaattggctctctaccatctttagcaagctctccttgaagcctggaaactgcctcagctgccaaacgatttacatttactcctaacctgaaattaggtcagtcgaccatgcaaatcttaatttcttatataaatagcgtgtaatagatgacagaaagataatcatattgcaagagagaaggcatattaaactcaatcaggaaggtgaagaaggatcctattcccaagccagtagcattgtaagataaattatgcagcaaaaaggaaatccgtaagcatttgtttatttattaacaagtacatcagtatgcttggtttagagcacaacatgtgctcatgcatagcgttccatcagaaacagaaattgcttatcaacaggaggtcaaaatattaagctagggttgtcaggcgtacaacttgaaaaagaatatgtacacatacatgtacacaacacaagaagacaccaaaaaaaaaagagaggcagataccattcataagttaagaacagaatactaaggtaacaacaacaatccagtgtattcccacagaggataagatgtacgtagccttacccctaccccggaaaggctgagagactgtttccggtagacccttggcaaaccaaaatatctcttggtattttgtatacgcttgggagggaaaacaacaccaaatggaatgtaaaatatggcaagcaaggataaatgagtgaaggataaattctaccaataagttcattgcttcctagcaacagtgggagacaacatctcattcctcctcaattgtagaagctgttttggactcaaaataagcaacaatagctaatctattcatgatcccaagattgtttcagcttaccaaaagcctattacttttgttcttaataacctcatcatccactactagaggcagatgtagtgcttgagttaaaggttcatctaaacccattaactttggttcaaacttgtatgtatgttaaaatatgcaccaaataagtacaaataatatatttcaaaccaagaatgggctgcggaacgcatattcaaatcgttgatctgcctctaactacctacttgctctaccaaaaaaactagcagttcctatactgaaaacaaaactacttgccaaaaaaagttaagaaaaaaaaaagcattcttgactgactatctgtaatacctcttgagcacacgagtggcgttaccatcatcaacagtaaacaaaccaaaggccatatgctcgggagcaataaaattatgccccatggtccttgaatactcaaccgcagcctcaaaaacgcgcttcgtacttgaagaaaacgccacatcagtagccgacgtagcagaaccggagtcctgagaagccaatttttctttatcatcctccacgtcatcatgccatatgctccgaacagcttcgcgggctttatcaattgttattcgagaaccaaggaatccaccagggctacgatcctctgcgatcagacccagcaaaagatgctgtgtatacaccatatctttgcccaaagcctttgcttctttttgagaaaacatcacagctttgattgatctctcagtaaatctctcgaacactccagagacaatatacaaagagcgcttgattttacgaggaattgagctgcagggcctatgagaaagggaaattccaaaaagggacgaagtagaactgctagtactacaagcagcggtagtggcggtagtaatagtaatatgagaggaggaagaagggcaatatgggaaaagcgaaaacacggtttgacatctcttgtgagggtacacagagccatagcgacgaagctgaggattgaagctgattgttgagttcacagaaagtggagaagaacacgttaattccat

SEQ ID NO: 54 - DNA, 4164 bp, Nicotiana tabacum
atgaagaatatcgagcgtctcgcaaatgttgctttattaggtatggtttcttttgattttgattcatacattatatcttttgatgatagctgaattgcatagtatacttgtttgatttgtgcttgtgaagttcagaaagtaaagtaaatcctgtttgatttatagcttcgttttttgccccttagtttgtgttggttactcattcagatcatttttccgctagatagattgctaaagcttttgatgctaattctttgttgttaattggaaggaggctacccttccagggtaggggtaagactacgtacatcttatcctccccagaccccactcgtgggaattcactgggtttattgttgttgttgttgttaattggaaggactcaatgtagggaaaggtgctaattattgtgtagttggaatttgaggtgtggttgatggttaccctaaatatatctatccagcatgttggagtagattctatagcggttggaatgaatattcaaatccccttgggcagtcacattactactgttacccgctttcctttatgtcacagtaggttccacttccacagttccagttcaatcggtagacaaagatggtcatgtgggttctttatatcagttttagcattttcttatatgttggatgtttgtttcatcatattgcctttttgaggacatttcactacgtaatagcagctatgccgttcttggaaatttacaatgtacgattatttggtcatggcaatttcacatcactttccaaattttatgttgacgcaattaccttgaaactcttgcttttttggtggatttcaggtttgagtctggcaccactggtggtgaatgtggatccaaatgtaaatgtcatagtaacagcttgccttactgtctttgtgggatgctaccgttctgtcaagcctactccaccttcagtatatcttctgtactccaagttgcagcttccctttttcttagatctgttttgatgtcacttaaacatattctactgctgttttccaggaaacaatgtctaatgaacacgcaatgaggttccccttggttggaagtgcaatgctcttgtcattgttcttgctttttaagttcctgtcaaaagacctggttaatgccgtattgacatgctacttcttcgttcttggcattgctgcactttcgtatgttctctccgtatggatcattctgtgatgcttaatattttctataacaagttcttgaatagtagtttttctgtgggtgtattggatgtcatctctttctttgtgtctttgcagggcgacattgttacctgctatcagacgattcttgcccaaaaagtggaatgatgatctcataatatggcacttcccatatttccgctgtaggcaccacctttcttgtctcttttgaaatgccaattgatcctttagaatccttgggcatacagatctcatcttagttattttgtttcgtcttttttcagctttggagattgagttcacaagatctcagattgttgccgcaattcctggaaccatcttctgtgtttggtatgctaaacagaagcattggctagctaacaacgttttgggccttgccttttgcattcaggtttgtcggcatatccatccaagttacattctcattcttcaggatatctcaaaatgaaaagttgtgtaaaatagtattattagtacaatggtaatatacaattttggatatttcaaagtgaaaagagtatcatataaattgggatagaggaagtactaagacacttgaatgaagagatcatatttcatcactaaaaaagttgcacttatctgtccatacatgttctcgtaaccaagcatggttgctctttaataccagatgcaaaggctacccgcctttatatctagcatttaaatccacgatagcacttgatggcttcctctttaatttgtttgataactagaattctcccaggagttggcctacatttattaaactatgggagtataataggcctcctctatcatgctcccactaatatagcggctccttgttagtgatagggttctaactcatgacgtggacccatattctgacattgcgtcattacattgaaccggagccccaggggcttactatttgtgattttctatttatatatacattgagttaatggagatttttgcaagggagaaaaggtttgatcctctcttatgtcatgtctacatcaatgattgatattgattttcccattgcgattttgattttcagggtattgaaatgctttcacttggatcatttaagactggcgccatactattggtaagaaagaaaatttgttttctaatttctatctgtaattatacatggctgacagctgtattctgtttatgtgtttcgccttaaactacatattgcttgtctttttgaatttgatgctaaccacatatctctttattcaagcgggaagagaatttcatgaaatgagctattaatgattgttattgttgagctattaatgattttacatacaaaaatacataacatttgcatggattatccctaattgcagagtttttagacatttttgaggtattcttttatgttggcatttttgcttgtttatgcaactatttatatccattaacttgtagctgatgttgaatgcacatggttttcgagaatgcaggcaggactttttgtgtatgacatcttctgggtcttttttaccccagtgatggtcagtgttgccaaatcttttgatgctcctatcaaggtgtgcatactgattttctcatatagctatttcttttgaattttcatttcatgcctttattagttacagagtcctgattataacttcgctttctctgcagcttttgttccccacagcagatgctaaacgccccttctcaatgttgggtcttggagacatagttatccccggtataacctccatttgcgtgaaaactccattcactttatgtggttagaacagagaggtttagcattttgcctagcggagggatcctccacctcaaaccatgtggtttggggtttgaggcagtagggaaacggtgggaaaagccactgttggtccctggaggggaaaaaatgggggtgggtggggggatgaggtttaccatattaaaaatgaaaagcttactttttgtgagtagctacttgaatgtatttttctgtttcttacacatgcttattattagcttttgccatgatgctgtatttgttttcatttttcaacttgttttttgcttgaatagatacacttggtaacatttgatcacttcaatcatgcaggtatttttgttgcattggccctccgctttgacgtttccagagggaaggggccccaatactttaagagtgcatttttaggatacacatttggtttggctcttaccatatttgttatgaactggtttcaagctgcacaggttggtgaatcaaaataaagcttttacactttatttctcttgctagaattgcagcgcccttatgtttgacttggcctttgttttttccagcctgctctgctatatattgttccagcagtgattggattcttagccgtacactgcatatggaacggggacgtgaagcctgtacgttttttcttttgacaatctgtttcaacttcatccacttgctaactttactgtttatgttctttatatgctgtttactaccattttagctacacactatttgtagattatattttctaggagttaatagatatgagaaaatgcatcttatggtttacctttaattcatccaaagaaaacatgcatgtcatgatttgtttggaaactatggacaataagttaaaggtagggaagggaagttttctcgtttcttcgagttggaagcaaaaaaggacgatcaagaacttctttttcgcctaacctttgatagagagagtacaaacccaaaccttcattgccttttctagtttatacggatacagagttaacgaaattttcgtttatggaagtaagattggggtctattctcaagtcgtagaaaattacattttcgttttgatgctgagtttgtattcttgattttctgttgagcagttgttggagttcgacgagggaaagacgaaaggcgctgaagaagccgatgccaaagaaagcaagaaggtagaa

SEQ ID NO: 55 - DNA, 7293 bp, Nicotiana tabacum
  misc_feature (1614)..(1614): n is a, c, g, or t
ctaattttgtttgagatctctatagtactcttctaaccacttttgaataatagccacttcttgcttcctttgcatgatcaaccagccagggtcattctttgtctcagaacgaaagtcaacatggtgtgcacctaattaaataagaaaaattaaaacatgaaactagtaataaaataaatcaatgtctctaatcaacagcaatcgtttttcattatgctttaattcaatgaatatcatgatatacaaaagcatatattacacaaatagccggtcatatagccgatgtacatagattatacagtaattatatatagttatacacattttatatatgaattatacataaattgtacatgcgctagttatttttaatttaagaaatcagatcagtggctatttgggttaactcttcgtacctttttgagttacgagtgccacaatgctagctgatatatttttcagcacactgtcacaaaaagagaaagaaaaaaatcaatttaataacaataaacaaagacttattcaagatttagagtctatatgagtttataatataagtcgaaaataatagattcaattaaaacaacaggactttaccatcacagatagatataggaccacatttagtggttttaattgtatctatctattgttttccactccaattataaactcatatggactctaaatcttgaatttacgagtcctcacattattatatttttatttttaaattttgaactcaccctcctctgctccatggatcttgcattccgttagagaatatcatattactgccaaatctcttaagaacttgctcaattctctgaaatataaacatattttttttaatttcttattttcgtgaataaaaaaatatgtaaagagaattttcatttgttaacaaaaaaagaatgtaaattagaaaacttacatagccaccaaattcagtagtgatccaatgtggtcgaggctctactccatatttctttttgcaatcttctttgaattccttgtaactataggaagatggaggaaacatgctttcatttgaacaagtcattggcataaccatctctgtacatgccttactcaaaaaccatggaaagaaacacactaaaattaggcatacattagaccaagatttcaagaatcatttaattttaatcacaccataaccaaactaaagtttaatataagtaccagtggcgaatccaacaatgcatttacggattcgatcgaacttagtatttacagtatagaaaaatttgtatatacgacaacaacatatcaagcccaccaagcaggggcgtacgcatgaatttttgtaagtgatgtcaaaatttatagaagaacgggaattataactttaattatcatacttctagacaagaaataactttaatctattggttttgttgagtcttaagttagaaaaagtccagaattaaattctacttcatgacagttttaaccacatagattctctaaaatatttgcaaaaaaaaaaaaaaaaaaaaaaaaaaaaaaaaaaaaaaaaggaaagcaaaagaagcctgtcagttctcaaattcacaacttacaattgaacagaaacaaccttcttttttcgtnagcaaaatcaagcacataaccaatgcatcaagaaataatttatgtcaagtggtgtcatttttttctacttatctgcttcttcacagtattaacacatatatttagtaaaaaaattcgacgaagcggtgtcgcgtgacaccgcttcgatacatctgcatccgcccctaccaccaagtgggatttggggggtgggtaggacatatgcaaacattatccctacttttgtgaaggaaaaaatattatttccggtagacccccaactcaaagaaagataaaaagagatagaaacaacaaatagtaacaatcacaagataaggagataaggtgatagaataatgagagatagaataacatttaatagaaaaatctgcgaataaaaagctacaaaaataccatactaaaaaaatacgtatagatagagttagatatatttttcaaaatctacacgtttaaattctgaatctgccactaataagtacaaagaataataaatggaatagaataaaaggtaattaaggtaaagaattctaaacctgccaatcccaaccacgaagaccatgagcatcatcaccaccttctaaattgaaacatttttctctttttgtataattgtaatataaacttgccgcagcaaatgcccggctgattttggaagctccttttggtaatccatcaattatcttgcacatcttaatttaaaaaaaaaaaaaagtttaagaattttttcactcgacaatataatttttttacacaattagtcatttataagataattacaaataaatttttatgataagtattaattgatgaactgataaaaatgataaataacctgttataatatgttaaactacactaatcatgtacaaaatctccacattgtcattgcattaagtcttatgtacaaatggtataaaaaatatttatgccaatcagataaattataaagtacctacaagtaacctttgtgataaacattaattggtaaatggctaaaaattgtatctagcatgtcatatcagattaaactatacccacttttgtaaaaatatttatcctgtcaattaggggcggacctacgtggggaggggtcactagaccccgtcagtctcgacaaaaaaactgtatataaatttcatatatatctatatatacagtaaagacgccttaaatactttatgcgcccccctaaaagcacaaaaactggacagaggcactggtttgtaggagtgcttaatccaagttcgaatctatgctcctacaacttatattttttattttatttttaaagtggtgtcgccgtaatactcaaatcccaggtccgcatctgttatcaatgtatatcaagttcaacaaaagttgatcaggggcgaagctatatatcccaaagggtagtcaactgaccacccttcctcgaaaaatttactttgcgtatataggtaacatattaggttttagaggtatataacatatatgaatactctttattagagaattttttccacttctttaagtttgaacacccttgagccttgagaaaattactgatttcgccactgatgctgatagaaaaaaaggaaatgtaattaaatgcaatgattttgaaaccaatttagtgctaattaagcagaattgtctacctcttgtactggatatgctggcaatggcatcataaagttggctttagtaggataattcaccattgctgtatatacaaaagcttcccatagccaatctctagctgaataaactgaatgtaaacccctgaaatataatataaaacaaatcattttattgaatcaaacttgaccttgtaatttgctacaataaaaaattatcatgtttctatttttatattcaaatatacttacttgcaagttctgaaaagtttactaacttcagtcaagccttcttcatgttttgataaagcatccaactctgtccaacttccctttatcactctataacaattcaagcttacctcctattcgtgagggcaaataaataaataataataaggtctcttatccaagaaagatttttatgaatatatcctattcgagataaaagataattacagtaatcgctcataataaagtgagattagtaatctgcaaataagtcaagttacttgttacaacatgttgaaaatattgagtgtaaaaatttatttacattgtcaataacggtggatcctgatgggttcatcctctagagttcaaataatttaagggtttgtttggccatgatttttttttttactttttttttggaatcagtgtttggcgatgaaaaattctaacatttgaatttctaaattttttcgaatttgaaaaacttcaaaaaactatttttcaagattttcacttcaaaacacttaaaaaaatttaaaaacaaccccaaattatattcatgtccaaacacaattctaattttaaaataccattttcaacttgaaaacaaaaattacttgtttaaggaatttcacaattcttatgtccaaacacccacaaatttgttgcgcttttagaagtagagtttcaaaatttaatatttattaaaatttacaatctttttgcatttctttataaacctagtaaataaggcgatattcgtcccagtgtatataaattaaatcctattataaaaggagcatctaggtgcatgaatgtgaccatgtaggatcagaacattttaaacaaaggggcttaatagattgtaaaggctttactattactaacgacaagagcgggttgctccagtggtgagcaccctccacattcaatcaagaggttgtgaattcgagtcaccccaaaagcaaggttaggagttcttcgaggaagggagccgagggtctatcggaaacaacctctctatcccaagataaaagtaaagtttacgtacacactaccctcctcagaccctactagtaaaattttacctggttattattgttgttgctgctttactattactaaccttgaaatcttgggaaacagcatcataaaagcttgaccatggggtgattttgtcaaactgcaagattggtgctgaagatgccactgcacctattgctatatgtgggtacttcaatctaaaccaagaagccaacactggttgaccagaaaaaacaaagttaaaagaggaaaggaaaacaagtatttaagagtgagagcaatttattaattattggatactactcgagaagaatgaacctaaatagccgttcactcaactgcttaaactaaaatagctgacggatgtataaaataggaaaattttattttgtgtctcagacaacttacactagttgtatgaagcattttttttatctcacagttttgtggacccgaatttttgtggacctagaagtgtaagattggggtccacaaatttatgagacaacaaagagcctcgcacaactaatgtcagttgtgtgaggcacacaataaaacttctctataaaatatataattcatactcttatataatacaccatccggtccactttcattgattttttgactcttttcacatatattagaaaatcacattttagcattaattcacaatgaaattgaccatattaaccttattttgttccttgaaaatataacaaatgctcctatgctctttacttcaaatgcaactttaaaaaaaaaattaacttattcttaatatctggaaaaaatcaaatattgtggaccacaaaaaaaattaaaaattcaattaaaattgaccggagagagtatatgcataactatgtataatctatatatatcggctagaaacaaacagtaaattgaactggctatttgtgtaaagattcctacttaacaaatgcaaaagtggaagaaaagttctgtttatttgaataattgaatgcatctaatgctaatgctaaattcatacaaaagagaactttccatgaacatttagcaaccatagaatgtaattatcattgattcacatggattggacactcaataagtcaatatgtccacacatgtaatgtcatgtcatttccatctatcattatgtcaaggcaaaaaattagctaaaagttaaaactttttcacttatattattacttttctttcattactttttttttgtttgtttgtgtggtgttctactatattagtggcagtttggacataagaattgtaaaatttcaaaaaaaaaaaaattaacaaaatttaagtaaaaataatatttgaaaattagagttgtattagaatatgaacataatttaaagctgcttttgattttttttatgaatgatttgaaatgaaaattttgaaaaacagctttttgaagtttttaaaattttcgaaaaattccaaaattcaacttcaagtgaaatttaaaatttgcatggccaaacactgatttcgggaaaagtgaatgttttttatggccaaacagttccttacttacttcctccataagagccaccaaaaaccacaaccggtgatgattcagaagaaagattctgctttaaactccttattagaacagcataatcagccaatgcttgctgtgaattcaagtatcccaaagtctttggtgacttgtaagatttctttccaaatggcattgaatccccataaaacctatgctaaattattacaatacaaaaaaccattatcaatttcattcccaacaaagataaataataataataataataaaatataaaaaaggttcaattttacctttctatatgaagtatcttaatattacaattcattatactttgggccactaatatcttatttttggaaaaaattcttgtatttgtcttgattctaacgaagttccaacttgaagtataatagatggtaattttaaatcatagtgaatagctggataaatttggattttttctagtagtattttgatacgtagaatctaccaaatcaatattggagtttcattaaacgtagtataaatacgattcgatttaataacggcaagaatataaataatcccttaaataaaacgaagtgtaaaactaaaatacttcgtatagtacaacaacaataaattcagtgtaatttcacatgtgaagtttggggaggatagtgtgtacgtagatcttacacatatcttgggaagataaagaagttgttttcgatagaccctcggctcaacgaatagtgaaaacaaagtaacaaacagtagcaacaacaacataatatgaacaaaaggcaaaatacttcgtatagtataggagtaaatttaaatatttttctcaaaaataaatacttcaaataaaaaaacatttcaagattatatacatacttcaatgaagactagaagagcatgaaacttaggagcaatatcaagcataaatccagtatttgcagcaaaccaatcaatatttccttcatttccagtgtagacaaagatagggcctccttgtttccaataattatcatttatgagatatttctgtttaaaaactttagaactctttggtagaaaagtgaaatggtcaagaatttgaggaaagtaatggactttaaatggtatttttgacttgacatgttgtttttctaatgaagattgataagttccaggtagataaattggcttaatttctccaactacaaaagagataataaacagtaaaatcaagaaaatgaaagaaaaataagaagaagaaaaagccat

SEQ ID NO: 56 - DNA, 2894 bp, Nicotiana tabacum
atgtctcgtttctcactcctattggctctcgtcgtcgccggtggccttttcgcctccgcactcgccggaccggcgacctttgccgatgagaatccgatcagacaagtcgtttctgacggtttacatgagctggagaacgcaattctccaagtcgtcggcaagacccgccatgctctctccttcgctcgctttgctcacaggtacgatgatctctacatggaaatgagatttttttttgttatttgcttattaatagtaattgttttattttgagtttaagttctatatatgcagtgagcatatttttttttttacataaataagataataacaaataaatcacttaatatgtattagttggtaatgatagtgtaaaaaaatattatactgtaatgtgtatataacttaaatctttttatttttgggacgatatttaaggtatgggaagaggtacgagtcagttgaggagataaagcaaaggttcgaggtatttttggacaatttgaagatgattcgatcgcacaacaagaaaggactatcatacaaactcggtgtcaatggtataattaatattatggcataacgctaaggccctgctcttttccttttttctcttttgcttaagtggagtcttaatttgttgatttggaggtaacaagttatagttttgtggttcctttaccggaatactctttgtttttatcttcagctaaggtaacagattaaggcgtaattatagttattattgtaaaataaggtaatttttatttagaagcttcaaaattaagtacaagcaattgaatactactctttgtaagtagactttgtatatatgtttttatttcattctcttttttcatttggagagatgtggacaaattaaaattataatataatgcgataaaacatatgttccactacagtatcagtatggtatttatagtttgcatattttattagtaattaattggtctagtgccttatcatgtgtagatatttcattcatattgtgtggctagtgggtaccctttctctctccaatcaaaaaactttttttaaaagctcaattcaaaagcttttcttcattacaactgatcctgcttaaagactaaaaacaatctaaattgaattcttaattcttctctattcattcatatatggacataaaaacaaaatcacagtacatggaaagaatataagcacctaagcattggactgcccaaatgaaaagtttttgcaacttaatctagttgtgcatagattcaacaacaaaaagtaaagaaataagtatgcattttatgcttctaagttctagtatatatggcccttattgtttatcgattattatgtttcatgacagagtttaccgacctaacatgggacgagttccggagagacaggttgggggcagctcaaaactgttcagccaccacaaagggcaatctcaaagtcactaacgttgttctgccggagacggtatatgcactcagaactcctctgtatctatttctggagttagtgatcattagagttaaactactttctgatgatttattatttccagaattgtggagtgctctgagtttaattatgctgtaactatagaaacactaactaaaaagatcttgaataggtatcctacaacaataaatagaatcctcataagaaataccactagatcgagcaccagtcatgatttcatatctggtaaaaatcttggctaattgatcgaagtggagtagactagcgagcatgtactgagctaatgcacaattggttgcaaaaagaagttttttctttcctaaccgaaatttccaatttcgtaattatagaaagactggcgggaagctgggattgtcagcccagtcaagaaccagggcaagtgcggatcttgctggacattcaggtaagaattagttagaatctcacatcattggactcttaaattgtaagtcttgaaattgcactcttaagctgaaatataacggagaaggcacttggcagcactactggtgcactagaagcagcatatagccaagcatttgggaagggaatctctctatctgagcagcagcttgtggactgtgctggagcttttaataactttggctgcaatggtgggctcccatcacaagcctttgagtatattaaatccaatggtggtcttgacactgaagaagcatatccatacactggcaagaatggcttatgtaaattctcatcagaaaatgttggtgtcaaagtcatcgattccgtcaatattaccctggtatgatatctctttcctccagtatgcaaccaatctttgccagtgttaatatccaaccttaatggtcaataaggattggttaagttccttacatacgtgtcattacagggtgctgaagatgaactaaaatacgcggttgcattggttaggcccgttagtatagcttttgaggtgataaaaggtttcaaacaatacaagagtggtgtttacaccagcaccgaatgcggcaacactcccatggtaagtcatctgtccctaggaacgtgatatgcaaatatattgacatagttacctaaatacaggggaaagctacagccgaccaagggtcgtcagttgaacacccttcacttcactgtcgtgcatatattaaatcttgaacaccctaagtgaaatttataacttcgctaaataggcatatacacaatattacaaacattgtgtgttgcattggcaggatgtaaaccatgctgttcttgctgtgggttacggtgttgaaaatggtgttccctattggctcatcaagaattcatggggagcagattggggtgacaatggatacttcaaaatggagatgggaaagaacatgtgtggtattgccacttgcgcatcctaccctgtcgttgcc

SEQ ID NO: 57 - DNA, 9988 bp, Nicotiana tabacum
  misc_feature (5337)..(5341): n is a, c, g, or t
atggagaaggaacacaaatactctttgtttctcacaaagttgaagttgttttttcttgttacattaagtactttccatggccttagccatggcttccaaatggatcaggcacgtacattaatgtcttggcgtcgttctaaaatgcatgctcagacaactacttatgctactaatgaggatgagacagaaaacttagtattttccgatgaaaaacatgtcggaaatatggaggatgatcttattaaagatggtcttccagcgcagccttcaaatgtgatgtttaagcaatatgcaggatatgttaatgttgatgtaaagaatggaagaagccttttctattactttgctgaagcttcttctggaaatgcttcttcaaaacctcttgttctttggctaaatggaggtaaattatatgtgttgatgattctttctcaacttaattttgtcttactaattactcatcttctcttaattcttttgtcatgcacctaatttgattaagtactcatttgttttgtttcgatttaatctaacttaccctttatgcacatatattctgcatcaaattaagttgaatattactccacgtgttccacattatatacttaacattttttttttccaatctattttacacattttatatatttgaatacttttttaactttagacatttcaatttacccttaatagtatattcttgtagccgatcaaatatctatgagatatttttgaagtcttttttcttcctaaatcaagtcaaatgttaatgtataaaataaagcagagggagcaataactttcgttttatgtttgtaatttttcttaatagtgatactcattactctccccggtccacaataagtgactattttacttttttattttggtcaaaaataagtatccatttacctaatcaataaggaattaattttatttttctaaaatttacccttatttacatattccaacgtgtcaaggaaataattaattaaggttaatttagtgaatatattttttttctctaagagttcgtatttctttaatggatgtgccaactataaaatggtcacttattagggaccagaagagtaactctttattatttgaaattttgatttcccaaaaggtataaatggtccgaggaacatctaattttcgctcatttgcaagaaagtggttcatagacaaatggagttattaagtggggacgcgcaacagagaattattggtcactttattcgttttgttcgctctttttctttctttacttctttactaaagtagaagagaaaaaaaggaagtttaaaaaattgttagtgtatatgaagataagagctgtcattttcttcggctattgaatgacgaataaaagcacaattgggtacaggtccaggatgttcatcattaggattcggggccatgctagagcttgggccttttggtgtaaaccctgatggtaaaaccctttattccagaagatttgcatggaacaaaggtacatttcatttgctaaactaatatagacctacttataattaatgaaactaatttctcaagaaataagacaactattttttgtaataacgtatactctatctttttcaatttatgtgacaacattatgttaaaggtgtcacgtgagtaggaagccagctgacacttagtaggcaaagagtctgttagattagttgttaattatacaattagaaattagttagaatcagttggattacattgtatatgtatgtgtatagacggttattcaatacaacagtaattttctcatcttctcttttcctctctaagctgcgatctctcttagctcaatctagaagcatccacgacagatgtttggcatggtatcagagctttgtgcgatcattgctctcgtctaattctcctctgagttcatgtgaacgaaacttcaactcgttcgtcttcatctccttccctcgagaacatcgaatcgacgatgacgacggaaaaaattgaccacattcatcctctgtttgtgcatccctcagatactccaagtttcatgttgattccagtccaactcactggatctgagaattacgaattatggcggagatcgatgaaaattgcacttaggcaaaacgaaagttagggttcgtcaatggcacacccactaaggatcagtttaggtcagagctacatgaagactgggagacatgtaatgcgattgtgctctcgtggattatgaacacagtatctccaaatttacgtacttagtggaattgtgtatgcttttaatgctcacctagtatgagaagatctaaaggagatgtttgataaggtgaatacgatgaggatctttcaatttcatagagaaattgctacaattttccaacgaacagattcagtgtccatgtattttataaaattgaaggagctctggctgagtatgatgcaatggtaccctcaacaaattcgaagtagtatgctgatcatcttcagcggcagaggctattacaatttctaagtggactgaatgattcctatgctcaagctagaagacagattctaatgaaatcagtagaacctactttgaatcggccttatgctccaattgttgaagacggaagtcaaatgagtacatcgggaactttatcacacattgggctgaactcaatagccgaggaaaatgacattacaacattgtggagctcagcagtaaaatgaggttcaatcaagaagaacaaaaggaattacagtatattttgtgaacattgcaagatgaaaggacatagtaaagaaaattagtaccagctcattggttatccgacagactttaaagatagaagaaaacaaggagcacctactggttaccaatgagcacctattggtcaccaaggaacaattgaggaagatgcaatgcaagggaaacaggtatgactgtagattttgggaatctttatgcaggcatatcatatggggacaacaacatatgcaggtgcaaaggcaagggactcataatcctgtacacatggaagatgctcaatctcagggacaatcttagggatatacaggtggtgtcactgttatatttactccggaacagtatagtcaaatcttacaaatgctcaacaaagattatgttccagaaacatcagctaatatggcaggtactatttgttcttttctggctagtaaaaccgggcacaattggataatggacataggagcaacagatcatatggtatctactccttaaatgttatttgatttgaatgactatgctaagcaaggctcactgttgcatttacctgatggaaaaagttgcctattagttatgttggtaaatgtagattggcacaaggggacatcagggatgtgttgtgtgtaccagacttcaagtttaacttgttgtcagtggctaaactaactagagaatgcagtgtttcatgtctttctatcttgatttttttctgatgcaggaccttcacattgggaaggtgaaagggactgatagaatgcacaatgacttgtactattggagaaataatatagagaataagataccacaatcattggctactactttgactcaatctgcagcattgtggcataagaggttggggcatgttcatcatagaatactacaacaaatgaacttttttaaagatatcaagacaaatactggcagaacttgttctatatgtcctttagctaagcaaactaggctttcttttcctcaaagtactagtggaactactacactgtttgagctagttcatggtgatgtatggggtccatacaatgtacctacatatggtggtcatagattctttcttacacttgtagacgattgtagcaggatggtctgggttttcttgttaaggttgaagagtgatgtctcatttgtattaaaagattttatgtcattaataaagacacagttttatagttcaatcaaggttttcagaagtgataatggtacagagttatttaactcacattgtatagatttgttcagtggtgcatgaattgtacatcaaaactcatgtgttcatactccacagcagaatgaagttgttgaacgaaagcacatataattttttgaggtaggaagaggtttcagggttgcattcctctaactttctggggattatgtgttcagaatgctgcgtatctgattaacaggattccatccactactgtggcaagaaagtcaccatttgaggcattctataggaggagtcctaacctacaacacctaaggggtgcttatgttatgccataagtgtgggtgccaaaagtgacaaatttggagcaaaagcaatcccaacagtgcatatgggatactctaccactcagaaaggctataggttgtataacacagccaataaactgatctttgtcagcagggatgtttcatttagagaagatatatttcccttcaagtcctcctactatcaacttagaccacctaatcttgtggagtattggaatggtcgccatgatccctttgttcttgaaactactattgatgcagctccattggagacttcatctatagttgagccagtctttgtcccctctagtccttctattcctacttctttgaatttaggagactctacagctggtgtctctgagaatgctactactgtatcagtccctgctgctagtactgattctctcattcttagtaaggctccttatgataatgtagcagatattactgttgctccagattcttgagagcttacagtcacaagaaagtcatgcagaacctccaagactcctagttggcttagtgactatgttcataaggggtccaagcctctatcacatgctgtaatgggcacaagttatcctttatcagtatatatgtcatatccttcactttcagacccctattacaaggtcatttatagcatctcatctgtgagggagcctgatactcatgaagaagctctttatgatccacagtgggtagtagctatgcaacaagaactgcaagcctttcaagacaatcacacttgacagctggttaatatacctcctgaaaagagagtcattggttgtaaatgagtattcaaagtcaaatacaatgctaaaggtgaggtggatagatacaaagttcgtttggtagccaagggatatactcagcaggaggggttggattactaagagactttttctcctgtggataagatggtcactgtgaggactatcttatccttggctgcaatgcatggttgaaggttgcatcaaatggatatattcaatgcattcctccagggtgatcttgtagaggatgtttacatggttctacctcctggtcttctaggacatgggggggagggnnnnnaggggggggggatgtaggagagtatgcaagctacataagtctatgtgtggcttgaaacaagcctctcgacagtgaaatcttaagctttgtgaggcacttctctcctcaggctttattctaagtcatcatgactagtccctcttcactcaaagatcagggaatgagctgttcctcatcctagtttatgtggataacctcctcatcacatgttcttctccttctctcattcatgcagctaactcatgctccatcagcatttcaagatcaaggatctgggggagatgagatactttcttggtcttgaaattgcaaagagcacaatggaatactagtatgttaaagaaagtttgcactagctccttattgcagacttatgagtggctgcttctaagcctactagcatacctacggaggtcaatcaaaggttcactagtgaataatttgatcacaactataagactgagggcaatactgatgagttgttgtccgatcctactggctatcagaaactagtagggaagctgctatacctaacaatgactcgaccagatataagatacacagtgcagaacctgagtcaatttatgcataaaccaaagagatcacacgtggaaggggctctaagggtggtgaagtacttaaagaatgcacctggtttgggcatcttgttaccttctaagccatcctcacaacttacagtctaccgtgatgcagactaggccaattgtcccatgacaagaaggttagttagtggcttcatagtcaagctgggagactccttgatttcttgaaaatcaaagaagcaaagtacagtgtcaagaagttcagcagaggcataatacagaagtatggccaatgcaattgcagaaatagtttggctcattagactgtgtgaggaactgaaggtgaagctggagttgcctgttaaactatattgtgatagcaagggagcacttcaaattgctgctaatcctatctatcatgaacgaacgaagcacatagaaatcgaccgtcacttcattagggaaaagatacatgagggcattatacacacagaacatgtgtccacaagtttgcagctggcagatattctaactaaaggtttaggaaaggcgcaatatgacttcctattatccaagctaggaatgttcaatttgttcatattacatagcttgagggggagtgttaaaggtgtcacatgagtaggaagccagatgacacttagctggtaaagagtgttagattagttgctaattatacaattagaagttagttagagtcagttggattacactttatatgtatgtgtatagacggttattcaatacaatagtgaaaataattttctcatcttctcttttcctctctaagttgcgatctctcttagcttaatctagaagcatccatgacagatgtttgacacattactatttggggagccaaagaggttcttctttatcatgtgttttcttaaatgttttataaatattttgaattataattttttttatgaattatagtactttttatgtaaaaaaaatgaatttgtatctaaatttacggtgtaaagtaagctagcgtttggccatagattcccaaatttgttctgaaaaatctgatttgggtgaagtttggtttggagatgaaaatgcgtttggacatcagttttcaaaacatatttcccaaatttattttggaaaaacatgaaatatgatttatacccacaagttctaaaaactatcacaaatacccaacagtaccattatcaataacattcattaaaaaactttgattctcgtaaaaactttgattatcaatcacaaatatccaaatttattttggcaaaatctatggtcaaacgggtattaagaactttgattctcgtgctatgtaccttgcccggaatggaattgtacgggtattagaaaaatacattgtgctgccaaatgcattgtacaataactataactacttatagttattgtatgttttttctttcttttatttatttacatatgtaatgatggtatacagttgcgaatgtgatgtttctggagtcgccggcaggggttgggttctcttattccaacactacctcggactattcaaagtcaggcgataagaggactggtacacaccgaaaaatctcgttaatacaatagtaataattgtcagtttcattattatttttttaaaacaattttaacagtcaaaatgatgaaattttactctttcatttaactcctcaacttcaatttcaacttcacatgctctattcgtcaacactcaactccaatcaaacattgtgcaaacagttatattattatcgtttgtagtctgtaactattttttaattttttttaaagactacacttgagtatcgttaaaaacatggtcaaatcttttggtcacttaaagtgaggcagaggtggtgtcttttcttatcaaacgagatttttcatttttttatttatcattaattcagttatatatttatttcttttccttaaactatattcttttttattgggtgacagctgaagatgcatataggtttctagtgaattggttcaagaggtttccacattacaaaggcagggatttctacatcatgggagaaagctatgcaggtatctagtacagtatcagtaattaacaaacgaaaaaatacaaaacaaaaacttttgatattcttgacttatccttctagtagtgagagccctcattattgagttctgtccaataaaatttgtaagaattaaggaccactgtatcagagacagcttgtgcatatttcagaccattcacagaaatgtcctcctgtacagtctcagctcaaagccgaaatgagcattctgattgaaaattttggctatatttgtaatacaatcttatataagtagtctatatctaaagtctaatattgacatgacagctaatattgctgtgactgctcatcacaggattctacgtaccagagctagcagatatcattgtcaagaggaacatgttgcctaccacaaacttctacatccaattcaaaggaatcatggtattatatcatttaatttgttgaccttttaatttgtttgatctctctgttatcaaatcttacttgtatacctagtgatgaggggcggatttaggggtgcaagggtgttcacccgaatcccttcgccgaaaaattacacggtatatataagaaaaagtctgatatttacctttatatattatgttttgaatttcctttacacagcccaaaagtctactctatgtcatgacataaattatttctttatattgcagatagggaatggtataatgaatgatgaaacagacgagaaagggacattggattatttatggagtcatgcactaatctcagacgagactcatcgaggtctcctacaacactgcaaaacggagaccgaaacatgccaacattttcagaacatagcagaggctgagttgggaaacgtcgatccttacaacatctatggtccccaatgttccattaattcaaagagcagatcttcttctccgaaactgaagaatggatatgatccttgcgaacaacaatacgttcagaattatctcaatcttcctcatgtgcagaaggccttgcatgctaacctcactaaccttccttatctttggaacccatgcaggtaatccaactaagtaaatattatgtatagcatatcgatttaacttatatataccgatagtataaacaatttttacactgtcgttgtatatgtattgatttatatatatacactgttagtgtaaaatgtgttgtaacaaataatctatgttatttttctatttataaattaaattctactttttataaataataacttgtacttatctttttggtcacctgatagaaactcttttatatcatccaatgtgtatttaaatctgttgcggcaatgatatttcttattttcaagattacaaaatctcactctttatgtttagtttatgtcacttttaatatgtagaaggtaattgaactcatataaaaaatagtgtatatgatatgatatgatgattttttttcttttttttttttcatttggtatggtagcaatttggattggaaggatactccagcaaccatgtttccgatatacaagagacttattgcatctggtctacgtatacttctttacaggtaactttattatgggcttatcttagactttggtttatgttcatgatacaatatttttaattgttcgaataaagaacaagtggatttgtattgtttggaaacagtggagatgttgatgcagtagtttcagttacttcaactcgctatagccttagtgctatgaaccttaaggtgatcaaaccttggcgtccttggcttgatgacacacaagaagtacgttcttcgaatatattttttaatgataattttatatatttgtggtgagaaataaatcttattgtttcgttctttgttttttttttataatttaaaggtagtttgtataatttctgcaggtagctggatatatggtggtttatgatggattagctttcgcaacagttaggggagcagggcaccaagttccacaatttcaaccacgtcgagcttttgctttgttgaatatgttctttgccaatcattct

SEQ ID NO: 58 - DNA, 4088 bp, Nicotiana tabacum
atggctaattcttatacaagtattaattttttccttgcccctattattttcttggcgattctgggattgcagttgcagagcagcgatggttttgggacattcgggtttgatatccatcaccggtattcggatccggtgaagggtattttggaccttcatggattgcctgagaagggcagtgttgagtattattcagcttggactcagcgtgatcgctttatcaagggtcgccgccttgctgaagctgatacagctaattccactcccctctctttttcaggagggaatgaaactttccgcctcagttctttgggattgtaagcttccctctatgcatttttctgattgctttttgcacttgtctatatctttattgtttactttttctagtcatatacatagattatatactaattatacataattatacatatataatacaaaaattataccttttaagtggttgggtgggcggctatttgggttaattcttcttctttttttgtatgtgtgttttgtatctgtgttattattcctgattgtgaactagtacgtctttggaaattcttgtttactgtcttttccttttgtctgtttagtgtgatgttagagttgactgagctttacgtttgtttttgtctgtttagttggatggcagttcaggaaaaataggttacctaacttaaataagttccatgtgccatttttaacgagattcaagtggagaaaatatgaagaagaaaaagaatgatttaggcctgttctgttctataattctgtttgtgtgtttgattggactggaattttgtcgatttaactactacataaaatactgactcttaatttgattttacttttcttctatttcgaattccaagctccggaaataaattccgttcttttttctgattttcctctcctctgccgccacttaactcctctccagacaaggaattgttctgaagtttctggcagtagcatgttgtaatttatgtgttataaagatagagttgcaaaatctgtagtatctgtagttgtgattttttcttcttaaggtgtgtgactaaatattctttggcaatttgcagtttgcattatgcaaatgtgacagtgggcactcctggactatcatttctagtggcacttgacactggcagtgacttgttttggctaccctgtgattgcagcaattgtgtgcgtgccctcgagacacgctctggacgagtatgtttgcttcattctagtacctttttctttctactttcaaatgtttaaagagtttttcttttttttgatcgtcatcctcgtctgtatattgccttctgctacaaggaagttgtgcatacttctcttccttttgtaattatgagactttctgataacctttttcagaaaggaacctgctgataacacaatggctgaatctgaaacacagtggatttctcttcaactgtctttttcggtcattatgacaataatatattctcttagttaacaagatatggggtagagaatgtattgaggaaattgtttttctgttaaggaagatacataactagcgcaaaaaagaagatttaaacataatcaatatttgcaaagtgagtctgatgcatgtaatatactgactctgaaatgaaatttctgatccatattgttccgtggcttgtttgtccttgaagaattttgagattcttactagctcaagtacttcaacttgtcacgacccaaaaatcccaccacaggcgtcgtgatggcacctagtctctaaaactaggtaagccgatttcaattacatttttggagccattttttttttaattaaataagtaaccaaaactaacagcggaacaaatatgaatgtacaatctcccaagactggtagtactaagtcacgaactctaactgaatacatggaatgatcacgaggaccgaatatacaatactgtttgattaaaaactccacaggagttcaccttgaagaacaaaattttctttgctcttttgccttttccttttaatgtttctgcatgtattatttgacacttgtaatcttttgtttgcttttgaaacagcgaataaatctcaatatttacagccctaatacgtcgtcaacgggtcagattgttccttgcaacagcactctgtgtggacaaaggagacgatgcttatcttcacaaaatgcatgtgcttatggagttgcatatctctccaataacacctcatcatcaggggtactggtggaagacatcttgcacttagagacagataatgctcaacaaaaaagtgttgaggctccaattgctctggggtgggtatgctttagttttttctctttatctttggaagagattatctttggatcttctgatgcatttctttatccgccatgattttttatattctacttgttcaatttcaggtgtgggataagacaaactggtgcatttttaagtggcgcagctcctaatggtctattcggacttggcttggaaaatatatctgttccgagcatgttagcaagtaaaggtcttgctgcaaattctttctccatgtgctttgggcctgatggtattggaagaatagtctttggagataaagggagtccagcccaaggagaaacaccactcaatcttgatcaactacagtaagcaagtcactttgatattctgggtttatcggttgcttctgtttctggcttgatttaggagaatgcgactgaatatttattaactcttaccctttcctgaattgcagcccaacttataacatcagcttgacaggaataacagtgggaaacaagatcactgatgttgatttcacagccatttttgactctggcacttcattcacatacttgaatgacccagcttacaaagtcattacagagaacgtgagcgacaagctgactgtatgattttaagttggagtttgtaactttgtattgtaaaactgaagatattttttttcttttttcagtttgattctcaagcaaaacagccacgtattcaacctgatggcgaaattccttttgaatactgctacgggctaaggtgaaccatcttttataatcttcatcatttattactttcttgacgtcctttgaactctcaggattaacatgctacatacgcagtgcaaatcaaactaccttcgaagttcctgatgtaaatttgacaatgaaaggcggcaaccaattatttctttttgatccgataataatgctctcgctccaggtaagatggtttctgctccttttatattacaaaagttctcttttagaatatcctaatatccagtgatgatcatcaggatcgttctggcgcatattgcttagctgttgtgaaaagtggggatgtcaacatcattggacgtaagtatctatcagttgcttgctcgtaagattttgtttctatccatggaattctgcaatataacttgcaccatgccagctaatgatctcacaattaccaacttttagaagttttggttcctatcgagttttttacatacttctagcttatgtataattggaaatgtgaatgtgacaaagtaaattagtaaaaaccaactagtaaaactggttccattgtcaaaagtctgagctatttgttgatttacttggattttgtctctctatttggaattcatgacagaaaactaatacacggatgtttttgcagaaaattttatgacaggctatcgcgtggttttcgatcgggagaagatggttttgggttggaaaccatcggattgtgagttcgcattcctgagtatgacctctttagtgtgcacacctgctcatataatttaactataaacctttcttggcaggttatgattctagaggatccaacgacaaatcgacaactctgccagtgaacaagcgtaattctactgaagcgccttcgccctccagtgtggtgccagaggccaccaagggaaatggaagtggaaatgaacccgctacttcgtttccatctgttcaatcatctaaacctgcagcaaaccaagcaccagcacatttcatttgccaacttatgatggctctgttttccctttttagctattatttgatcattatttcttca

SEQ ID NO: 59 - DNA, 2845 bp, Nicotiana tabacum
atggcgattcatacttccactctctccatctccatacttgtaatgctcatgttctccgtcgtatcatcatcggcggcggaggacatgtccattataagctacaacgaaaaacatcacacgaacggcgagtcaacggtctggcgaacagacgatgaagtcatgtctttatatgaatcttggctagttgaacataagaaagtgtacaacgccttaggagaaaaggacaaacggtttcagatctttaaagataaccttagatacatcgatgaacataactctgtgcccgataaaagttacaagctgggtttgacccagtttgcagatttgaccaacgaggagtacaagtccatctacttgggtactaagcccgatggtcgtagcaggttgttaaatacccaaagtgaccgttatgcccctaaggtcggagatagtttgccggattccgttgactggaggaagaaaggtgttcttgttgacgtcaaaaatcaagggcaatgtggtattttccttttaccctctgccttgactctgcacctgttgtttttgttttcctttttgttcgtacttattttctgtttaaagtttgtccatgctttctttactgatggctttgatggaaatttggaaactttagtagtttgataaggtaagatattaaaataatcacagagtcatgagttttaatctaagatcaattttaatggcaagttcagttgaccctgcattattgtaaattttagcttaacattaagtatgattaattaggtcagcacgatgaagttgacaacttttgctccaatttccgcatctaattgtggcaatataagtaatgcttttttcccttggacaaaacactagtttccggaattgagctattttattcaatttaaaatgaaaattttctgttttaatgtattagaactataaagaaaccgaaacattaagtaaacttcggattgatctgtgtttttcgggaatttagttgttagtggtctaattttcggtttaaatgcagttcttaatattggataggcattttggcacttttcttggctgtcgcttctcttaccttaaaattaaaattatggagtacctaccaagttcaagatcttatggttgtaaattgaatttgtaaaaggggttcttcttcgtttgctctgagatccttcttttagctcgctccttaaatatttactaatcagtggtttgtagctccaaccgagtgtctatcggaaacaaactctttacccttctagggtaggggtaaggctgcgtcacttgtgtgaactcactgggtttgttgttggtctgtagtccgatatacccccatcaaacacccttggagttgtttcactatgtctagttgtgtcaattgttttggcaaattatgcagccttgattgattggattatcttccattttatgcataagtaaatgctgaggaaaaaatgatatgtttatatcacataaagcaactaataattttcttcgtaattggtgttgcaattgggaaatgaaacagggagttgttgggctttctcagcagttgcttcaattgaagcagtaaacaagatagtgacaggtaatctgatctcgttatctgaacaagagctggtagattgtgatacgtccgataaccaaggctgtcaagggggtctaatggacgatgcctttaaattcgtcattcaaaatggaggaatagacactgaggaagattatccttacaaagccaaagatggaaaatgcgaccaagcaagggtcagtatggtgttctctgtcttaaagggattataggaaatgaactaaatacaagttgtgactattaatattttgtttgcagaaaaatgccagggttgtcaccatcgacgggtatgaagatgttcctgataatgatgaaaaggcactgaaaaaggccgttgctggtcaacccgtcagcgttgctatcgaagctggtggcaaagacttccagcactataaatcggtattacttcagatttgcctattgtcagtaaagttgttttcttttaatcgaattagctagtgtttacacaggctcaacaaatatttctgtattttcaaagttacagtgagttcagtattaaaatttttaaatgttgatcctattaagtttaaatgttggatccgcctatgccccagggtatctttaccggaaaatgtggtgcagcagtggaccatggtgtggttgcagtagggtatggtagtgaaaatggcatggattattggattgtgaggaactcgtggggtgcttcgtggggtgaaaagggctacctcaggatgcagcgaaacattggcaaccccaagggtttgtgtggtattgctacgattgcttcttaccctgtaaagacaggccaaaaccctccaaaaccagctccatctcctccaccagtcaagccgcccactcaatgtgatgattataacgaatgcccagctggaacgacgtgctgctgtgtctacgagtactataaatactgctttgcttggggttgttgtcccatggaaggagctacttgctgtaaagaccataacagttgctgcccacatgattatcctgtctgcaatgttaaagcaggcacctgctcaattgtaagtgatctctgcttgttattgttagattgtcccgcattggttgaggggaagtgttgttgtctccttatatagtcttcggcaagtctttttaacagttaaggttgtttcctttacttatggaatcatgtttttgttgatacagagcaagaacaacccactaggagtcaaagcaatgcagcacattctggccaaacctattggtaccttcggaaatgagggaaagaagagcccttcttct

SEQ ID NO: 60 - DNA, 2875 bp, Nicotiana tabacum
ctaagcactttctgcaaatccaatttgtgaactgccaaagtcgaaaactgtgtgatatgctctcaagaatgcatctccaagaaccctgcaaaagtagagttgaatatatcatacaactggatcttcatgaatatataatatattataacttatggcagtgaaaatagtcttaccagaggggacgtcgcggatgcgcgtttaaagttgtaaatccactaatacagtggacaccttggctgtcatcaactctgataacatactattacacagaaaggaagatagtaagtggaagaagagaaagcactgctatttaaaactataatatgttactaatatacggcctaaaaacaagacgctaacggcttttccaatgtaccttactggaaaaccagttcaagttgtcgaagcaattttaatctacattgctccgatcctccaaaaatgctaaccgcactcatgttggatcctccaaaaagtgcaatgagatttttgcgggatcccagcaatcagtggcgaatccaggatttgaattttatgggttcaatctttaagatttttagtattgaactcattgtattttgaagttattgcttcagtactactatttattagatttgactgaacccggtactaatatgatgcatctgcctctgccagcaacataaattttaatgggaagataagaacttttctccgatattatgtcatctccgataagaacagatgtaattctagcaccagttgctacctttaacacatattgataatggaggaatagtatcagataacaacaaacctgatctggagaaaggggaaaagatttgtctccaatggtaaatgttatatgtggcagggcaaagacatcacagttgataaatgattttcccccgggattcggaagcttctcacacagcttcagcacaaattacatgtattagtagtaagtaactaatgagaactcgaaaaacaaaaagacacaactgtgacatgaatacctgattggcatattgaaacgctttttcttttgatctctcttttctgatctctacttgtatccagaacactatcatctcacaagaagaacataacgacccattatttgtacagagtccaattctgttgcatacgttctccggttgtaactgcatgcagccaaacaaaaggatgacatctaaataagagaacacctaaaatacccgcacacaacaattagaagttaaaaagcagctacccctgctatcaagcgttcccagatcgaatccccataactcgagacaacttttttgcattccaaactaataattccttccgctccaatggcatgatttatttgagttaaaatagtctgaaatggagatggctgagaagaaattgatcttgcaaaaaagaattaaaatcaacaatggtttaaatacagacagttggaccagcgataaatgatgtccctgtatccacaatagctggacatccatccttacaaaggcctgaaagggaaagagcagaattacactagaaatgcattgtttttatatagtaaatcacttatgtatatgaagatattacctgttgaattgcttcctataaaaagatcccctatctcaatctggaatttttgaaaaaaaactcagttttttcaggttaccaagtaaacaatacaaataaagttccattaaacggaggcgcaggttacctcccaataaccattttgagcgactggtacgtatgtatgctgacccctgaagtgagtccaatccatgcctccaaagataatttcacccgctatcttagacgtaggatctcgatttagccagaatgagaagattgacttggtaaccatatgctgaagcaacatgttatacctgaaattaactcacacaaaagaatgtggatttcaatttcaatgacacaggtaagaaatgaatgagagaacaagctcattaaaactatgtcagaaagcataaattactatgtcaaaagttattataatatgaagagataataatttaccatactggtgtgacattccttgatgtcgtgctctgatcaaatccaagtcctagtactccatcaaatcgtgcacgcaacaatgtcaagtatccctcccgtgttacctcagtgaaaacctgtttaataaattttattcaacatgtaacttgaaaacatatatatctacaatttcagctgcaaagaccggcacctgctgctttaagacagcacctccaactttcacattgtcttggctgaagaatccatgaactgaaccagtgccaaaagggattttgctagactttcctatcataaaagcccatgtatagaagtgataagtatttcgattaagctattctacgcttaaatatcaacaatgctctaaccaaaataaaggtttggaggtccattgggtaactaccaatttttgtatacgtatttgatagtcttgatttgtacctggaacgaagataacatgcaatctgcattggataaatccattcaaaagttagttagtttcatgtagtgaaaattgttaatccacaacttgacaaagactaaccgagaagaaacatctggaagaagggacccaaagattggaacttccagtatcaaacacaacaatgaagcgttggggcggtgaaccaataccaatctccgcgaagtactgaacatcatgataatttttgaggtaaactatctggtcattcggagcagccaaatttctattgcgacccctgagatctttagcgtagattcttgcatcgcttatgctagaaaggtccaacgattgcctttttagctcaatcctaaccatatcatcagcatatacgttgatgcaggttatataccatattacaagtgatgcaagaaggattttgatctccat

SEQ ID NO: 61 - DNA, 2322 bp, Nicotiana tabacum
atggcgtcaattttcgctctttcattatttttcattattatctctttctgcatcacttcgatcaccattcccgttcaatccgacggtcacgaaactttcatcattcacgtttctaaatccgataagccccgtgtgttcgccacccaccaccattggtactcctccatcatccgatccgtttctcaacacccttctaaaatcctctacacctactcacgcgctgccgtgggcttctccgcccgcctcaccgccgcgcaggccgatcagctccgccgtattcccggcgtaatctccgtccttcccgacgaagtacgccacctccacaccacccatacccctaccttcttaggccttgctgactccttcggcctttggcccaactccgattacgccgatgacgtcatcatcggagttctggacacaggtatatggccggaaagaccgagtttttccgatgagggtctctctcctgttccttcaagttggaaagggaagtgcgctactggaccggattttcctgaaacctcatgtaataaaaaaatcataggtgcccaaatgttttacaaaggctatgaagcttcacatggcccaatggatgaatcaaaagaatcgaaatcgccaagagatactgaaggacatggaacacacacagcatcaactgcagctggttctgtagtggcaaatgctagcttttatcaatatgccaaaggtgaagctagaggtatggctataaaagcaagaatagctgcttacaagatttgctggaaaaatggttgttttaattctgatatattggctgccatggatcaagctgttaacgatggtgtgcatgtgatttcactttccgttggggctaacggttatgctccacattatctccttgattctattgcaattggagcttttggtgcatctgaacatggcgtcctcgtctcatgttcagctggaaattctggtcccggcgcttatacggcagtgaacattgccccctggattctcaccgttggtgcttcaactatagatcgtgagttccctgcagatgttattctaggagataatagaatatttggtggcgtatcattgtactccggcgatccattgaccgatgccaaattgccggtggtttattccggcgactgtggtagcaaatactgttatccaggaaagctagaccataaaaaagtcgctggaaaaattgttttgtgcgataggggaggcaacgctagggttgaaaaagggagtgcagtgaagcaggcaggcggagtagggatgatactccttaatttggccgactccggtgaagagctcgtcgccgattcacatcttctccccgcgacgatggtaggtcaaaaagcaggagacaaaataagacactacgtaaagtctgatccttcaccgacggcgacgatcgtgttcagaggaaccgtgatcggaaaatcaccggcggcgccacgtgtagcggcgttctcgagcaggggaccgaatcatttgacgccggagattctcaaaccggatgttattgcacctggagttaacattttggccggttggaccggatctgttggaccgaccgatttggatattgacacgagaagagtggaatttaatattatttctggaacttccatgtcgtgccctcacgctagtggattggctgcgttacttaaaagggcccaccctaaatggaccccagcagcggtaaagtcagcactcatgacaacagcttacaatttggacaattctggtaaagtatttacagatcttgccactggccaagaatctactcctttcgttcatggatcaggtcatgtagacccgaaccgagcattggatccgggtttggtttacgatatcgaaactagcgattacgtgaatttcctatgctccattggctatgacggcgacgatgtcgccgtgttcgtgagagattcttctcgagtgaattgcagtgaacagaatttggctactccaggagacctgaattacccgtcgttctctgttgtttttaccggtgagagtaacggtgtggttaaatacaagcgggtgatgaaaaatgtagggaaaaatacagatgctgtttatgaagtgaaggtgaacgcgccgtcgtctgtggaggtgagtgtgtcgccggcgaagcttgtattcagtgaggaaaagaaaagcttgtcgtatgagattagctttaagagtaaaagcagtggtgatttggagatggtgaaggggattgaatctgcatttgggtcgattgagtggagtgatggaattcacaatgtgagaagcccaattgcagtgcgttggcgtcactattctgcggcatccatt

SEQ ID NO: 62 - DNA, 3034 bp, Nicotiana tabacum
tcacataggagcaagatgaccttgtttggacaatttatcttgcatccacctgtgaagcatttccagtgctgccttaggttgatccattggaaccatgtgaccagcatcatggacctttaagaaagttaaaggcccatagttcttttgaacacctttctctacaccatctactgcaaaagaaacttgtgtggcttttccaaaggctttttgccctgaccatttcattgcatgcacccatctcgagtttcctgcccattatagcaagaaattgagtttagttgtcaattactaggttgttttcatctttcagtttattgtaacaaaattatgtttatatatcacatataaaataaaaatagttaccggaaatatatactaaatccggtcaaagagagatcatatccatgtaacacaatgtataggaaggcccattttttttttggttggtcgggtaatgttttgttttgacaataagtagtgtcacatggatattctgaatgtaaggtcagttgccgatatgactatattattacatgtaaatgttatacatttggcagcctacttgcactttcttagaaccggctttaacattttttgactttgtattttaattttctgtgatacataggtataattaagttattttgctttacagaaacatgcttaattttgtccatatatgaaattagatgttgggtcagagatgaatgaagcttaccaagccaattgcagataaggtcatattccccagcatacacaagtagcttgataccatcctcaaggagtgaaggaattccctcttcaagattcctcatccagtccaactgcattgcctggtaaacctcagagctacatgaaacaaactcaatatccccaacaccaagtgcctttttaacttgttggtcattgaggaaagtttccatttttgagaagtcatagcagagatcaccctcacatctcttccgcacgtcatagtactgcaactcggaaattacatgactttaacttctctacactaactaacaatgtaaagaaatttttattgttacttaaaagataactacagataataagtgagatcagtaatttggaaaatgagactgcaagtagcgtgttgtacatcattagctcaaagaaaatgagattgcgctttcttacatttttgtcaccagcaatgtccataatcttgttgaagatgcttgtacaaacaagatatgcagccatgcaagcagttccgccatcttttcctaatattatttgcatagaaataaagctaattaatgtcaagattatattagctgctgctatatgaaggagaaagaacttacaggataaacaaaaaattaagaattaccacaaagcttaattgccaactgacattttggatatgatttctctatggcattgtaatcagatttttttatcaatttcatatccagagcatagtcagtgtaggctttgtattgaatttctggatcagtgagtccattaccaatagcaaatccctatacaaattaaatacacttggttaagttatcggcatgatgacaaatttaaattaaacctacctaaaagtttaactgaaaaaaaaaaagaatggtggaggagctaatgagttagaaataccttgagatttacgtagatgccttctttatttttgtttccttggtggacccgagaagcaaatgcaggaatgtaatgcccagcatatgattctccagtaatatagaaatcattctttgcatactgagggtgtgccttgaagaaggcctatcatcaaaagaatttgaattaaattttattaattatatcagttaaactttagagacttatcacgagctaaaaaaagaagaatgaaagaataagatcaacctgcaagaagtcatagagatcattgcttacgcccctttcatcgtgacgaatatcatcatcgtttgaactataactgaaaccagttccagttggctgatcgacgtatataaggtttgagacctgtcaaattgcaatttatcttatgttatcatcattcttcaactaacaaatgaaagttgcatgtttgattataggatttaaccaatgtaaacgacttttacagtattgttatatatatatatatatatatatatatattaacatgttgtattagtccggttactaatcccacttaaataaagagaagcgtagtagtcattgctgtcaataagcgatgaactacttttaaacttttgaattctacaagtcacaactaatgaacaagtgataaagaaaggaaatgctagtaggtaaaaaggtactttgcatgatggagcaaggttgagtaacaaataaaaacatggagggaattcttttagacttttaccatattcaaaagatctaaccgacgtttcttgaaaaattaattgggtaaaataaaaaaaataaaaaataaaaagcaaaaggaagaagacaagaaccttgtcccagccgaaatcattccagacaagagacatattatctgcaattttgaatggtccgttttcgtaaaacacagccaattcactgctacatcctggccctcctgttagccatataactactggatcattcttcctgcttctcgattcaaagaaaaagtaaaacatcctgcgaaaaacatattaaaaaaacacacagataatttagcattaactaataatacccataaatgaagcaaaaagagcatttaatccaattcaaaccttgcatctttagtatgtggaagacgataataaccagcgtgatgacccaagtcttgaactgtagacccagaattaccaacataagataaattcaatttcctctcaaaaagcctctgttcagaatcccctgttgctgcagccttgttaatatcatgtttagggaataaattaagctgtctgattagcttttctgccattgttaatgggaatttaggagtagaagataggaaaaactcatcgtcattagaatttaaagttgatgagaaagataaggaaatagaagcaagaagcagagtaagaaagagggatgaaggcat

SEQ ID NO: 63 - DNA, 2056 bp, Nicotiana tabacum
atgttagttatcagtgattgttatataaattcttgcaaagctttcaactttgtgatcaatttgcccgtcatgggacactctcactctcattcttctcattctcactctcactttcactcatctaaatcttccgatgatcaaaatatggatatgggggaatcgatcaccacccaaacagacgtttctttcatgctcgctaagcatgttttctccaaagaagttaagggcgattccaacctggtgttttctcctctctcaattcaaatagtacttggcctgattgcggccggttctaaggggccaactaaggatcagctgctctgcttcctcaagtccaaatccattgatgaactcaactctctttattctcattttgtcagcgtcgtctttgttgatggcagccccaatggaggtcctcgtttgtctgttgttaatggtgtttggatcgaccaaacactgccttttaagccttcttacaaaaaggttgtggataaagtttacaaagcagcttccaattctgttgattttcagtgcaaggttaggcctttattcgtttgtttcattcaaatcttgtttcttttgtgctggggtttaatattctttgttcatgctgactgctgaaaattggttctttaactagtataattgaccctgcatattactctcatcataagccctccaaatatatcatataaaatggatatacatatagtaaactgcaactaattaacttgggattgaggtataaatgattgattgaccaatctgactttaaaataatgaaaagtgttaaacaattaggacagaagctatattgcttagcctcaagtagtaacaaaactaaataatgtcaacggttgatactcgtttcacagaattgaggcagtttaaagagtaaaaagtattggttgttaatttgaaaagtaagatgaaagagtcacaattcatcttcatcaatgcttattgtttagcaggttagttgactagttcgacattttactgagtggtaataagcttcttttttgtaggtagctaaagaagcctaagtagttctaagctcaactggatatgtggccgtgcttaattttgtaaaacttcagtttttggcctaaatctacacccaatcagtgcttaaaatataccatgtaaagcatccaaattctcacttaccccttgcaagtactgtaatcaatcttcttactgcaaactccctttgttggctaaagcatatacgtgttaattctgtcgtatactctgtttgtcttgctaattgaataaggctgctgaggttgccaatcaagtcaatcagtgggctaaaatgaagacaaataatctcattaaagagattcttcctcatggaacagtaaacaatatgacaaggctcatctttgcaaatgcattatattttaaaggagtatggaatgacaagttcaatgcttcagaaacaaaagaccataaattccatctcctcagtggagggtctattaaagcgccgttcatgactagcaagaacaagcaatatgcagtagcctttgatggcttcaaagtgttgggacttcattacaagcaaggcaaagatatgcgtcgtttctgcatgtatttaattttgccagatgctcgtgatgaattaccagctctattggacaagattagttcagaacctggttttatagatcatcacattccgtttgaaaaagctaaaatgcgcaagtttcttatccctaaattcaaaacaacttttggttttgaagcttccaaggttctaaagggacttggcctcacattgcctttctccagtggtggcctcactgagatggtggattccccgttagctgggaggttgtttgtttcgcagatttttcacaagtccttcattgaggtaaatgaggaaggaacagaagctgcagctgttacagctagtgtaataatgaccaagtccttgataattgagaaggaaatggagtttgttgctgaccatccatttctattccttataagagacgaatctaccggtgctgtgtttttcatagggagcgtgctgaatcctctagctggt

SEQ ID NO: 64 - DNA, 6821 bp, Nicotiana tabacum
  misc_feature (4532)..(4532): n is a, c, g, or t
  misc_feature (4901)..(4901): n is a, c, g, or t
ttagcttgagcaagctgactgaagttcaactgcattttcatcatcagtaaggtcactagacatggcatgaggtattctatggcgtttcaatatacgcgatgtggctattcttgccgattcatagttcaaaacaatcaccttctcatcatccaaatcaaatcttacattcttttggttaccatcttccacaagctgacgtaaatgtttcaaattcagaacttctacgccattaaccttcttcacctgtacaaaacggttcaaaatttccccgaaaacaaagaggaaaaataattataaggcgcccttatgttgtcttttaagggagaatgaagtaatagaagcaacaagtgttttacctgcaactcggcaaggcgctcataaccagcattaatatcatccatcaacacctaattaattgcaaacggtcatattagcagcatatagctcattgatctgcgagtacaatcctaaaggaaaaacagacctccgtctctatgtataggttaggaatcatgttgcgaagcaaaagttaaggcacaaaaaattgaagtaaacaaatacaaagtttattatttatgaagttagccaaatgacatagattgtcaagtaaaataagacatgccttcctcccatgtcagaaatcttactggaaacatttacaaaaggttatctagcagcaaatatcttaatacgttaacaatgtctgcccatttggatagacccgtccaccatcagttttgtgtgtctcagtatgtatttagcatgtgaaattatggtggaacttcatggcgtctttatgcttttttgtttttctatttttataagagatcaaattatttgagttttctatttgacaaaaggataagaaactctagatacctgagaaaggatgatgaattgttcaccaggtttcttaggtagttcccgaagggctcgttcacacaaccgacggggtgaggcattataccagtcttctccatactcgtgaaggaatggttgagttaatggaataaagacgagaccagcaaatatgaaataactcggaagcttgtcaaattgatgaactggaacaagtggctgcaactgcataatgttaactagttgttagatacagtagtcagttacacagcatcaaagaaacctttagattaccaatcatacaagttgataaagtgttaaatctaaggcttagcaaaaagtgcagtcaccttcccaacaccttactcctatgcatcagattcccaagagcgacaaagcaaaaaataaccttggtccactcgcacaccaaaatacttctaacaaaacaaaaatttaccttgctccaataccgcaccaaaatacttctaactacataaattatgtgacacccccaaatacttcaaggcttctttcatcttttctatttttctatttttgtaaaagatcagattgtttaagttttccatttaacaaaaggatacttgatgagagcaactatagatacctgaaagaggatgatgcattgttcaaccttcatattataacttgtgcaaatgatgaatttacttctaccggagcgataatgtcaataagttattttaccagagtaattctaattgaacaatgtagatgcagtgatttcgatctattcgtctgattacatgcacccaggatatgagcagaagtttgaaaaatcactgggagatacattcgaaacaacaattaattatgaagggttaatagaagggtaattatgaagggtaaataaaagtgacttacaggatgaagcgtgattttgaagtcatgcactttgccatttctcaagactttaagttcagcagtttcattaggtttcttcatagataccagatggtcaaatgtgatcctctctctgtttcggaaaggaactgcagatcataagcaatctcaaaactttagtccagggaaataaggttgctaattttgatatgcattttagtcaaaatgcagaagggcaaacttttctaacagaaaataagttattctagccttacaattttcatatcctgcacacccacttatctggtttctggtataattatcagctattcacatggcaagagaagaaactcagaattaaaaacgactagactctaggcttttccatctctcaaaaggaggtcattaatttgttactcatagttgctcgttgaacatgaatactttttagttggtgctggcctgcctaaaagagcctctacagcaagaaccacatccatgtttcatccaaatccgtcattttacgtcacgaaacatttagagaaagaaaaaggcatgtgccataaaatgtaagaaaaagctgtgaagaagaatgttgtactagtttaactgtcgtacataagaattacaagaaatagagagaagcaaggcaataagagaaagccttacctgttccatcatttgctatgggtacgccatcaaatgagaggattatgtcgtctttctttaatactctagaagcatcagaaagtgggttgattcggctaacaagcacacctgtcaatttggactgcatttggaagtactctcgaatttgtgcattttcagtaggttggcatgacaagcccagagagcaaaacccaatgtattcaccccgttcttctactccagctataaaatgctttatcacaggaacaggaataatgtagctgcaaaatccaaatagaactgaaacttttaaggccaactatgcacactgtaaatttcctttccaattacaacagtttttctccaaggtagattgtttaatcaagggtatcagtttagatttgattgtttgcagcactgaggaagagtcgaaatagaatgaacttgaattcgagaccgctatttgaaatcatagtgaaatactggaatttttatctcatgtctaagagctactaaatgttcccacaagctaagcaaatgttgattaaaactagtaaatgtcatcaaccaaatctccttatcaactgcatgtcatcacaactaaaagctttcaggcattcccacatatgccatcctttgtaacccctctgagatgaaaagaataatattatgaagctagagccaaagggctacaactcaagcttcaaatttgtgaatgcatgaacaaggactgcgtgaagggaaaaatctgaatattatgacgaagaaaaatggaagagaagatttgcaggagaatacatgtgtgaagggaagaataacatgcagtcagattcaggtaaaggagagaaaaatctgaattttgtgatgatgcaagtggatattagagtatataccccatcaatatttaactaaataatatatggtagacccagcaataaatgatgcaatggaactaaatctgtatagtagttctatccctccggggtaggggtaaggtctgcgtacactctaccctccccagaccccacttgtgggatcctactgggttgttgttgttgttgtagttacagagacacaaagtaccaaaataaaattctaatttacccaatattctctgcaccagagaggttttggaaagcaactccagcaactttgtcacccataattgctggtcctccactattccctggatttatagccgcatcaatttgtattgccaatagttgactagcgccgtgtacatattgcgtaggttctacccttgagacaacaccttttgtcacggatatattatctccccctagaaaaaagcaaaaattattagagaactcctcaggtgaaggtatttgtggcttacaattaagtaaagaaaaaaaaaaagagaacatagtatagtgaagaaaacaaaaatataactagacgtcaacaaaagattaagaaggatctgcactattgaagacaagaatctagtatatgcaagctacaaatatccagccttgcacctagttgacaccagagagaaacaaaatacatcatgaaagtttccttttcactcttctggatcttatttgttcgctgctcgtatgagccctcgaaaagggtacaccgaatccgagaaaatagtgcactctctcgcggagtatagctcacatccaaacatctgattagggaatggggcaatgcccatgaagctctggcggaaagggaaggcatgccaggccgtatgcctatgggtgcacaattcttcgaaaaagcgcatgctacctcggagacctgggaccttggcttagtaatgaatgaagggaagctcttcgagctttctccgccagcggcttatgtagtggtcggccttataaagctcgctaagcctcgcttccctctccccttcacttattaattaagtggaaaatagtcgtcggcattctataagcgacttgaccgagtctacgaagctttgcttttcttgtagtcggcccgtaatgcctcccttcatttgcttgcctcctttcagctcagaatgcctaatgcctattatttagtgctagaagctaaccgccataagctcacccttcgggtctcgcttccagcgcaggaggccaagcattctgccagacgtcccggcctgggagccccgttcgcctttggtngcttattaattaagtgaaaaatagtcgtcggcattctataagcgacttgagcagaggagacaagaaaaggctcagtggtaactgttatgaatgtggaggagtggggaatttttgtcgttactgttacaatgttcagacggacgaatgctgctaggggagtgcagaatagaccagctgaacgtagtcggagaagctctaaaggtaagttcaagtcggaaacattgtgtttccacaagaaaagaagcacatattttttataggatttgatttgataaatggaaggaaattgtcaattgaattggcagaaaactatggtaaaggggagcccaacgtcctcagcagagaggaatggcagatgcattccccccnaatgacattagcctaatttatttgaactatagaccaaaaagagccccattggagtgaaatatatatagtactcatactgctgttcccaattgatttggattgaggtgtagctgattggttgatttcgtgagaaaacatgaataaaaggagctcacttgtgaattgtgattcatctgccgttgtattttaagacacgaaaagaagaatgtgaatttcatattaactcgacaccgtatcaacaactcagttatttttatttttctgaaaattatatcaataactcagttatttcgaataggtatagcatcccattgctaaacatgaatgttgtatatcacacaaacaataggggggaaagggaggttcagagttcgattcaagtgtatggggggttgggtgtttacattacatcttgaatcagttacaagaaaaataattatcttgaggatgaccgctgattaaaaaaaaaattaccttgaggataaccaacaacagccacagcttcttggagaaatggaacatcaccaagctccaaagagttcatgccctcccagaattcttcactttctaccaccagaatagccaagtcacattcatgaccaacagcttgcactgttgctctatacttggtaggagaaccatgctttcttacaagtacaaacgtatgatcagccacaacatgagcatttgttaggatcctctttccccgaataacaaaacctataacattaagaatgcaaaatccgaaagtaagctttatgttctcttaaattattagtaggtcagatacttgataagttgatatgagctctgtattctcttcttttaagaaaaagaaattattacacatagagggtggggaaggggaaatgggggaggggattacaagtggggaatcgaaacccaaacttgtaacaaaagcagataagagaattaaccttccaaaatcgagtccccataacaaatcaatcaacaatcctcaatcctaaactaattgtagttacaacatcaataatttcatgctttaatcctaaactagttggcgttggagttgggacaacaaatctctaatacttgcagcccttgggacaacaacaaactatttatctcaatcagtggcggagtcaccttataccaaggggtgtcaatttgacacctgacaccccttcacgggaaaaaaatatactacataggtaggtaaaaaaaattatatatatgttgactccccttaattttttcgtctatttacttatatatattttgacaccccaatgaaaagcatgcctccgccactgatctcaatgaacaacaacttcataaaaagtagccttttgacaaggcttccttagtaaatgaagtgccaatgtaagattttcacaataaccaaatggctagtaaaaaaacggaagcattacactgatagagaataacatatttagaaagtaaatgaaagagaataaaaataccagagcccgtagtttcacgctgggacttgttctgccatggaaggaagtaattaggactactggaaacagtgaatattttaactacagaatccaatgctagctctattgctaaataagcatccaccattccactacttaatcgctgctccaccgccgccaccggttctacttccgatgcattggattgaagactatcattttcctcagctctctcgacatgaggtgtcgtagaagttgttgagctattgctgttattcaaggtggaaaaaaatgaggcggaagcagaagtattaccaacagtgctgctataattgcagcgccgaacaaatcgatgaagctcttgacgtcggtgatgtaccggagctacatctccggcgataataggggattgaaagtggagatttctgtttaagagctttcgtgctgtacggagacttggacctattcgtaacat

SEQ ID NO: 65 - DNA, 3929 bp, Nicotiana tabacum
ctagctaacttgcttttcactagccttgtaatacagcattttctgcacatagaacatcatgtatccttgcgcagctctcacaatgttttcgctcacttgagtgatccaagcatcatcacatttgtaccattgattacttaacctaagatatgttacgtaatgaccagcatcaagtttaccggtatgggtgatgacagcaaacagctcaaactctgaggacgattcacaggacgcatcttgctcgtccccatcaaaggagaagattctatttccaaatcgactcctcaagatagatgaagaaaggtaaggcgacatgtccaaggaaaaaggaaactgtaggtagtgatcaaccttccttgacattttcttaatcacagaatgctcaaaccttttgatatggaagcaagaaaccaaaggcaattttcttatggacatctgtttaagagattcctgtctcacttgacaatgttggcagaagaacttctgatcagaacccaatttctcaggtcttgtgaaatgatctaaacatcccatcaacgaagaaattcgaccgttttggctaaactttccagattctgcttccttcttgtgagtattatgagacttctttgatgtcatctttgaggaactcccctggctcagttccaagtccaaggagatgtctatacatggatcatatgtagtagatgtgaagccacaagctgtacacatgacatcagaccgcaagattccagaaaatactctatgagcaatgcaacagtctccactacctgtgccaaagaaaaagatttgatagaatgagatcacagctgaaaaaacacaatgtgtactcctaataagttacacagagtaacatacttaatatgcacagcttaacgtgctcctcgacacacttcataacaagtaaaagtccagttatgccataaagttctatcagctattgcattactagacaaaacaaaaatcgtcctatcaggaatggcaaccaacagaatgagtagctaaaagcaacggagtactattgaaataaaagtaaaaaactcagtaagaaatgtatccgcaagacacatttattgcctcaaaagctctatctattccatttacacaaaaccattcagaatcatagataatgtgtattcattatttaaatgcaatacccagatgttaactaaattttgcaaactcagggcagatagccctgcaccaatcctctaattaagaggaatgagaataggtgtgaactctcacaatcaaagtacgtgtcacttaagtgagaaccaaatcagcatatttacaatggtagaaatgaattgttgctaaggagttacccctctaatgattgctctgctaaagaaatgcgaggtaccgaggagctagactcacaagaataataaggcacataagggcttatagaaaggaggaagcaaaaggctgtcaacctagtaaagatttcaagctttcttgaaggttgcgatcagctcactcgagagtaataccctaaaacatggtaaaattgcgagttaatacgagaactattgtaccagaagaaaactcctatgctgaaatcaataagactaaccaaactgagacttactggggagagagtaggaggaaatctttttccttttgagaaacatctctaagcctgacagcgaatatcaacttgtaaatcgcctatggcaaagaaaagacctaaaccataacctgcattcaaatattactattttttctcagtgacaatggaagttgggattgccatgagagatgagatgctagaacaaagataagcccatcaagcaggccctgagtgccttttagtcagacgttactagacatcacaaagatgcttgaacacactattctgcttctgacagaaattgcttcttccaccccctccccaccaacaaaagaaattcaaaaaattcacctactgaaggacttgacctttgcaagtacctgtacaagtttcagtaatccacttgtttgaggtttttacaatactagcctcccttggctatgttacatttatgttactttaaagttgctgccatgtgacctggaggtcacgggttcgagccgtggaaacaacctctgcagaaatgcatggtaaggctgcgtccgatagacgcctgtggtccagcccttccccggaccccgcgcatagcgggagcttagtgcaccgggcttccttttttttttattaaaatatatataaacaatgttgtcaataattttcccagtacaacaaaaaaaagaaatctcaatgattggtctaattcggaagaaaagggaaaaaggaagtataagaaactaatataggcaaggtgatgggcggagaaacgatgggcaactaataggtactctaatgcaacaaacaaatttacctggactcaacgcctttcccttatcgttctgcatcctttcatgaatcccgtcaagcacggaaatgaaaaactcatgagcatcctgctgttcataacttgcaagatttgatgcatgcttccaccagctgttccaaagaaaggtttacatccatctgaatgagacacagcacagactgcaactagatactcaaaaagtcgaaatccacatctaataaaacaaattacaaatgtatgtatatcacaaccaagttacacaccaccagtggcggagccaggatctccgcgaagggggttcaagaaaaaaaaaatcgtagctagtgggaattgaacctatgacctttcaaagattttgaacccccttgaccactaagctacacttatggttgtgtcaagggggttcaaaacttaatatatagaggtaaaaaacagattttgccttatatatacagtgtaatttttcggcgaagggggttcgggcgaaccccctttcgcccccctaaatccgccccagcacaccactgtctaatttcacctctatgaagggaaaagcgtggtacatacaatcccaataataaaaaactaatcttgtccctacatcattttcaaagaagtgcacaacccaagctaaattaaggaatcttttaccaatgtattgttatccttataaaaaagaattatatacaactatacctcaatcccaagcaaatcgggatcagctatatgaacttcacaacacacacacacacacacacaaaaaaaaaaaacgtgcacattataacaaagccaaacattatctcaacaaaccaagaaaacatgatcaaatgcagacctgtaaaggaactttgcaggactaataggggtccgatcgccagagaaaacagcagaaaacattgcatccaaatcacaagccaaacacagcattgttgagttcttattcccattatcactactactccttgttataacactgctattctttcgctggcaaaaatatctgttatgcttgtcactcagaaagtaattcctcaatggtggtgtatgaagcaatgcttgaagcactgaattcataaaacacgtgtttccaagattgttaaggcccctcaaaccccattgtacttctggggttgttgagtcattgccgagctgactcggcaacggactcgagttcccaacgatcaagacttgctctttcacatcaggcgtccacggtttgtactccacgcgcctcctcttgcgcgtgctctccggatgcggcggagggtcttgtattgatccgatcacggtggcctccgtctgcgctagtgccacggcggcgtcgaagtcgctattgtacacctggtccctacacccgcagcagaacagctcggcccggtcgatgtccaccgcgatgcagtgcagcgaggggtccgcagcgtttcccgccggatgtgacggcgcgtgcacgcggcagaatacctcggcgcacgtgacgcaggcgtacaaccgcggcggcgcgtgtccgcacgcaccacatctcaccagctcattcggcggctcgcggcagat

SEQ ID NO: 66 - DNA, 3253 bp, Nicotiana tabacum
  misc_feature (268)..(268): n is a, c, g, or t
tcataacttactgtgcacgagcttatttgaaagacgttcaaccttgccaagttgagttgcgctcttcagcattgcctcgctgtcagctataaactttgcaaacttagaaccctttgtatcaccatcactatctcctcgaggaagcattggcagatgaagcatagagggactttgcttggaagataaaggcggagttaatgcccacacagaagaaagctgttcatctggtttgtcaagatattccaatgatagattctgcatgtctgtntaacggtgatagatcctgcatgtctgtcaggaagaacagaacagaaatatcagacgttggtatcgtgcctaccaagtgttattcggaactgatttcttgagagttgcaaaacttattaagagcttgcagatcaaatgttactgcttttattcttcatacgggaaaagaccacccattatctgaaaatggaagtatcaggaacagtcgaataaagtaccttcaacaaacttgaagatgggctctaaagctgcacatggaatgctgaagttcaaatgtggaatgaccgtccctccaccatgtctagcattactgcatcaaaaataaaactacaagacatgaagtttcaacaagaaagatattaatagatggaaaaactatagaaagaccatgatatgtgaagattaacataaatgagatgactaaaagatcttctgtatgagatcattcaaattggacaccattatttttcctgtatgaaaagcgtataaccaatatacatttttggtaaggacaattaatatacattcaaacaggaatatctttcttcaaggacttctcaaagtactccaggacgcagtgtaccacaatatcattagattgaacttcaagaacaaacacatgtaaatatacataagctgaaaaagaaatatcctcaattataagcatccccagttgtcatccaaaagttaattaccttgttacaagggcaatcatgtgtccttctgaattaacaacagctccaccactaccaccagggtgtacagcagccgttgtttcaagcattgccggaaaatgttctcctaaacttgattggttgagcagagaccgcttggcttcaactaccttagctattgcacccacacaagcagatggaaggaagtctatattataagaaaaagtaagacaaattacaaatacaactaaagaagtctaatataggtatgaaacatatgaaataaatatacgtagtatatcatgttcaaaatgaaagaacttaacaaaattattcacatgaaaagcaatttaacctccagaacaacatgatttagtactattgggcgcacaaagatagtcagttccagaaaattatgttcagcaaaggttatggaacagacaagttatctgtatcaacgaaaaaagatggaacagacaagttaagattgcatcaataaacaatagtagcacttgcaacaacctagctactattaaaatatccttgagatacagcccgactcgaataagtgagttaccaggaatttcctattcaaaaatcccattctttaaagctgatcatttgtacttgctttcacaatagaaaacatcaatttaatgctccagaaatttaccttttttcgtgataactgataagtgacttcaaaactctagatttgattccccaattccactttgttagcataggtattaggtatatatcattcttatggatgaagatctgaattagtgcctatggcttttattagcccacgaaaggaaaacgcttctttttaatttcgtctacctttctccttgttctgctagccttgtttgagccctacaacaacctcgctattcttaatctgacgtgcaattttttttaaccagaagatcaaaacactgacttggactacaaatcaaattcagtatcagtaaacaatgtcttcacctaaaagattacccagttttgagccctcccgaccaatctggttattatttctccattggaagacacctcaagttcccttgcggaggcgtcgacatcacctcataactactcaatcagtcatcaaatgatcatcatttggtgaaggaagaaacatcaagtattccagcagtaacaaggagatgaaaatgatataatacgacccaatcctgcaattgattataatgacacttcaacaaattcttaacacaagagaagcaaggtggaagagagagaaattcaagataaacaaagtttttgtagaatattctaaaatttcagatttactgtgatgcgtgtgtcaaaataaaagtaaaggcaaaaatattttatttagacaacaaatctaaagcaagatttaccacatcgtggtccaaatagcccatgtccgagaatgtatgcttttgatccaggggacgggcacatgaagtcagcagtaatgggacagagctgatcaggaactagctcaagttgtagtaatgcaacatccagaggtcctctggagacatgaactacctttgcatttgtccatacccagggatccataaaatccaagcgaacacgaatgatcctactgcctgtctttgccaggttaactctaaagctaccttgctcattgtcaaccaagaaatgcggagtttttagttccttttgaatcaaatgtttattcctacgctgaatgtcaaatttctcaacccctggatgctcagattgatcagaagggatgagaactacatcagatttggtgttatatcctgaaccgtttacagatgtttttccaaatctccatggctctagaagatgagcatttgtaagaagaagaccctgcttgttgagcaaaactccagaagcccatgctccatcatcaacagtgataaggcagatagatgtcattgccttctcaatcaaggatgggggaacaggatctattaggagatgctctcgagtatcattggaaggtccattccgaatattattggagggtgattcatttttaacactgattaggtttccattatcaaaatggatctttctcctagtttgtagctcttctttaagcaggctaccacaagcagatgtaatagcttcccatggaatcaccatctgccacccaatgcttcaatttcaaattaaagcaatttatgtgaagatagatctcagcaagaacatagagcacattatgaaatgtttacctgaatttcagcagcagtagccctttgtctgagtggccgagacagaacaccaataagctctgcatgttcccctaacactgggctaccttccat

SEQ ID NO: 67 - DNA, 6179 bp, Nicotiana tabacum
ctggatataagtttgaacatgatccttccagagagaacttgtcttcaaaacatcccttagggttgatagaacttcaaaagatgtcgcctttataacatcgtcatccttgttgtacggctgttcctgcaacataattaagaaagcaaattttagaaacaatttcaaaactgaacatcaagctttatgagtttatcattgctgggtagaaagaatgcacaaaaaactgaggcatgccttgagatgatcaactttcactgtaaggggttcttcactgacctgcaaatgaatgccactgtttcagtcctcaaagtgttactcttgtacatatcacaaaatgggctatcgagacgggaaaaaacaacatggtgaataaagtaaggaaatctgacagtgaacattcaagtgtgacaaatctactgcatagtcatcaaattgttacactagtatattgaagaaaatttttattgaaacaaaagaaataactacataagggaatctgactgcaaacatccaacaataaataaacccagtgtaatcccacatgtgggggtccaaggagggtagtgtgtgcgcaaaccttaccctaccttgtgaaggtagagaggtaaacatccaacagtatgtataatctaataggagaattattaataaggagctcaggggttgagagatttaagtccaatagaagaggataagaggtcctcaatcacaaaataaaacgaaaaaataagaagacataagaccctccaatggctaagtaagcccataaatggctgaccatgcttgagtactccagctttacagctaaagccaagaatacgactctataccaaattagagctcaaacaaataggattctattcaatcttttatgtgttttatatatgtttaagccccagggctttggtctagtggtaagagtacagcccgtgatatgtaggttgggtgcacatcacagttcgtgctctggcgcaaacaaaagcctagtatttaggtagacaatggtagaatggcgagcccattatccaccgagtttgaaaccatgagccacttaccctcagatttctcggttatcaaaagtctaggatttcattcaaaccaaatgcatcggcaatcaaacagatgctaaactagcacatcatagaagaaactcaatagcttttctcttctacaaccccgaagtgcaataagaaagacattcctatgactttgcaggaaaccagttgtccaaaattattacaaagtgctactttctgttgcaaacaagcaatcaagaataactaaaagagtgtttcattctattggtaacacatcatacacaactgggaaaaacagctcatttagcctcaaattgcaacagacctctatcgcttgacaacgcagctgctcagttatatgaagccaaaaggagaaagactgggtgttgggacacaaaaggtaggaaagagagaaaagtatacaagtgcaatgaacccaagatgtcaaatcggcagtctcaaaatcaggagatgatggatatgtagatgaaaaatacaactaaataggacacaaagaaaacatatggagctacttataaccaaaaaataacgcagacatttacttaccacctctgtcatacgtatccgcctgtgaccaataagaataacctggtcgtctttaatacttgttatctggctcatcataagttgcatcaaccttgatcagaaacttcttcaataacttaaagcaacagaataacacaaggaacaacaagatgtacctgagcaagtgtaccaacttcatgaagacggttcaacatgtcttttcctttaagctcatagatgtttttttctgtatctgaggcagacacaacattaggatcagtcccttgctcgtctttcataaggaaagcgccagcataaggtgcttgcctttttcgactttccagcaaggctgctaataccttgggatcctgcagttaaatttacggattatgtggagcctcagatcaatttgttgcatgccattacagtataatttatctttttctggaaactaacaaatgaggctaaagaatattacaattgagcaaagacgctctccgaattgaaggttttagcttttcaagcttacaacttcagccaagaactttccatcaattaaagtagagcattcttaaagctgaatgctggttacagacttaagaggaaatagggtccaaaacactagctgaaacagtacaactctcagaaagttgacagtaattatacacttaatgtttaaagcttatatctattttattttgaaaattacgaagactaagacatggtttaacccatcctagacaaggtaccataccttcacataaatatgcatataaaaccctggaaataacggtctgtgtggaagtggcagtgctagaacctgcaccaagaaaacaacatgcatcattataaattataaagaattaaaaaagtacagcccacacagactttatttatttttagtataataaatgacataaagcccttaattgcaagtcttacaggtaaatcttatccaaagataaaaccataaccaaccaagaaggcaagaaatgggtcgcatccattaaatttacaaacagatgaattatgagcaaacaagaagcctccaagaaacagtgttttctttgcattcgttcagtatctctcttttttagggaaggttgataaataccatttttacactgatcttgcaacaactagcaaaaactgaaatacacatatgaatcttcctttcaaagaaaaacgagatagtagggcaacctattactttatcctcacatgtactttccaatgctttacttcttaaataacctagaagctgttgattaaattgaaactaaagcatgaagtaaccctctctaggcctccaaatataggatgaaatgttaaaaattaacatccatcaaggtgccttctgtacggccagaagtcagaggcatgaggcataactggtcgaatgttgactctgaaaagagcatatgggaaggagagtattctaattacaatggacaagcaaacaaaaaaaaattcttttgctgaacaatgtgaatcaccagcttcttgcaggtgagaaatcattcaaaatcattaggaactttctgaagcttcagtcttgacatagagctgatcaatttgcctctacaaggtgggagttacacatggtccagagagagacaaggcaggaagtactcaaggatcgacgggtttctaatatcaggagatttcaaagaaacaatctcaaccaatacggatggttcaactgacaatgtgctcaaaacaaatcaatcttcttgattatgggattctctgtaaaaaaaataagccatttaaatctgaaaattgtgagacaatagaagaagcagatgaaaagataagttgatgaatacttattacataatacatgacacttaattttcaggtgtgaaaagaacaataatctttgatgttggactaacttaacattaacattctactaactaacattgccattgtattatgtgtcctcgaactcaaggtaagaagaagtgaagaacaccttgaatttgcttttctggaaaacacggaatagtgaacaatagtcgtaatagactaatagtaaagcatcacctagaaagtgaacagttcaaatcgtgatcagtcaccagaacaccataatggattttttcgctgaaagtcacgaaaatagcccagctaaagaaatcattaatattcagcatagactaagggaaccgactctcaatgaccagagagaacgcgataccaggaatctcaaaaccaaccttggtgtggcgtaaggtggcagctaatgtggctcgaattggcggctaaacagtgactagaatagcaatgaaatagcgtccaaaatagatatctggaacaataatcataatactggcctgaaagatggtagaaaactcattggaagaatggccaaaatagttcttttacactgtaaatgggacatggttgggatggtggcagaaactcaatggaagaatggtcaaaaaggaggaattttacagctaaaaagatgactgagaaagaggcatgatacagtcaaatggtctacagaaataggtatgaggttaacgatcaccaaaagtggaaagaatagtaaaaaagttgaccaatcgggtagcataggctgccccttattaagatcaccaatggtatgtgatacgatctgagaaaataagaaagaggatgaattggtaacttgatgaaaattggaatacaagacacatctatttgtacctaacaatcaaatagaaaagacacatctatgtgtaggtgagaaatacattaactttatgatatctttccaatgtgagactaatttaacactactaagataacacacattaacatttgaacaagaacaagtgggtgctacaagatggtcaagggatgacaagaataatatcacattgccgaaaatccaagctgtgtgattggaaaaaaacttgaaattacttacagatgatcttagaagatgaaaatagagaggtatatgcttgagcggagatggagatgaaagaattgttggaaaaattgaaacctttagaaatcattaggtgaagcaaaagagatgattgcaaatgaattacccctaatggaagacttgattaaggagttggcagactgtgccttagtggaggaggtatcaaggaagcaaaaatcaataacattgtggttgaaggaggggtacagaaataccacattctttcttcctcctcttcttttttttttttggaagaaagtggaataccacattctttcattgaaagggtaatgctaattcaagctacaatagcattaaaaaagttgctcactgatgagaggctctctgacgatcctaagaagattcaggacaagaaatctttaaaaagacgactagattttaaaaatttgtcaattgtcatttcattaaaatactaatgctaattgaagctacaataacattaaaagtgtcggtcatcgatgtgaggttgtctgaggatcttaagaagattgatatcaagattctttaccactacagcctgatttaaaaaagtctacactactattctttcgtctcaaacggaatggctgggttcaaaatatgagaatcaaagcatctgataataaaaccgttctttttgagacaaagagggtatcaaaagctgttctttggaaaataaaatgttgaagaccttcacagcattatatcacgtcaaggttgggaaggccttttactaaagaataattgagtgtacaagtctacgagaaatataatcttggcgatccaccttttatatcctagaaagttaacttcttagccaaccatcccttttgattgccggcagagtgttgcaaccaaagttaaaaatattttctatatcaaattgatcccaattctgcgtcaatgccaaccacaaagattagaaatttcatcatcagcgtccatgtttgcatccatatgtacaaatttgtataataatgaataaaatcatatcacaactacccaaagaagacataaaaccagcactaacaacagaaggaactcacttaatatcttctcttttggtgcacaatctgacatggccacgccgttataacaaaaagttgacatcttttcttaaggagtcattttaccagccatcaaatattggaataaaatgtacttatataatgatggagcaggaaaatacttaattatgcgccaaattatattagttaataacaatgaagtgataaattgaactgagaatgtacattagttaacaaaagtcataaaatttattttaaagagacgtgtaattctattggtgcgggtgcaagaaattattatgaactaaccgtaaggcaatcttcaggcttaaaaacagtaggaacaatagcagcggaagccttagaatcagcatctccgcctttctcggccggcttggcttcggatgcagcagcttcggaattcgattcggacccatcagtagaatccgaacaaaagaatcgtcgagacaaataagggcccctgcgattcgaacttcttagcgaacctaaaacccgaagcaagggcgtattcgagtcagtgccacggcgaacttgaggggtaaatgccgttgtgacggcgtggaaacgattctgcagacatgaggatgtgagagccttcaacat

SEQ ID NO: 68 - DNA, 3166 bp, Nicotiana tabacum
tcacgcagcttcagcaaaacccagttgaagattaccatagtcaaatacagtatgatacacccccatgaatacattaccaagaatcctgcatgtacatgaatcttttcgtatgaaacagatcgagaagcttttgaataaattgaggtattcttgtctatgcatgcaatttctatgaccttattaaagcgaaatggttgtaagaataataaaaacgtaccaaagaggaccacgaggtggtggcacatccaaagcaacaaacccactgaggcaaatggtagcaatcccctctccagttttcaaaatatactggaaacagaaacaaagccacagttgaaacaaggctgagtatgcaacataacaatgtaacatatataaaattaggaagagaggcataacctgatctggagtcaggacaaaatccttatcaccaatattgaatgtaacatttggcatggatgatatgctattgcagtcgattacggattgccccataggacttggtaatttctcacaaagctgtgaaataccaaacattaggcattaagacaatgctctgcactacttaaagagaaaattcactcacctgattcacatattctagcacactctcctttgttgtcttctgtttcagctggttctgcatccaaattacagccatctcacaggcagtgcacaatggggcctctcctatggaacttccttcattttccttctcaaccacacttctgatattcgagctgcaaaattggttgtagattgtcacatggttacacaattcaacatgtattgtaacagacatagatccttggttcaaatctcattaccaaccttcatcataatgaatttccaagtactaggcccatgaaaagatcatacttacacgtaagagagcatgtccaagatataataataattgaataagattgtgacatctttgacagcttaagtttttaaacgagatggttacacaattcaacgtaaacaacatagctctagagccttgacatatgttccaaagacagattgtccagttcaatttagtaacttcaccaaaaccaccttaattcacatatgctccaaagaacaggagaaaagcatccatacctcaaatgctgagctccattaagataacataaacctacttgtaaacaaatttgatctggtgtgacctgcagacaattacaagtagcattatatctacaatgtcacatgcagtagtggccggctcaaataaataaaagaagagaaatagaacaaacccctgatactagtaaatcccaaatcatttccccatattgagaaatggtttctttacattccatgctcaatactccttctgctccaatggcatggttgacttgtgtcacaacagcctgttatgtacttgctataattactttcaagaatttgttcaagataactagatagtcgaaaggtctacaacttctgcaacaacccaactaaagtaaatcatacagttggaccagcaagcaatgatgttccagaatcaactatagcagcacaaccgccttcacagaagcctgtaagggaaaagtattaagacaaaaagaaattattcttatcttaggctcgtaatcaacagcaacgctcacctgttgattggttcccaatagagaaatctcccattttaaactgaaacagaaaaaggaaaagaacagatggggggaccgtgaaaaaaggcaaaaaggaatggaaaccatagtggaaaaaacaattcaagtacctgccagtaacctttctgagtcaaaggaacataagtatgtttatccttgaagtgttttggatcaacaccaccaaaaacaagttcacctccctcttttgcatttatatcgcgattaagccagaaagagaacacaggctcctttacgagatcttgcttcaccatattgtacctgcacatatatcatgaatcaaacagacaagattccaaaaactgagaagaaaggaaaacaagatagaattggttaaaaactgaactgaacaaatcaattgcaggccttattaccagacaggtgtagtgtttccaacagcaatttccttgaaaccaagcccaagtattccatcaaactttgcaactataaatgtaacacttgattcccgtgtcgcctcaataaagacctgaagaaattgatgtaaaaaattctcatccattgtgttttcagaagagcagaaaggaccataatatgaggcagtgatgacttattgccaagcaagatttcacctgatccgtgactacaagatcgccaacttgaacattatcttgactgagaaatcctgaaattgatccagatccatagtggattgaacaagattctcctggattagaataaacatcaaatataatcagaagccatcaataaataacttcttagtctttcaattaatgtgaaagaaatataacattaaactatgatatgaacatcacctttttttgtgtatgtactagacttccttgccttgtatttggaatggatccagcatgcaatctggaaataattcaagtttaaggaaaaattctgtataaaccggtaattcaacaaaggaacaaataactaaaagaattcaagttatatacactaaaagtgtaaggatttttgttactatcagtatagtttaacttctgatagaaataattaagtaccaattattgttaccaattaatgttttcttatagagatttacatgtaattaccttataagtgacctgattatataactaacctttgcaccgttagcacatatagaacgtaaacattaactaaaaagaagcacaacttacagagaaataacatcttgatgatggaacccagagattagaacttcctgtatcaaatatgacagtgaaattttgagggggtgaaccaatactaatatctccataatattgagcatccaagtagttctttaaggacactatatctgaatttgtgtcagatttcttcttcttcttcttcttctctatgtccttcatcacatgctttccatatctgtcttcaagtcttgctacattggctacatttaagctactgatatctaattgtcgcttcttcagactaattcttagcaaactatcagaggaagcaggaaatacaaagcaggcaatggccaataaaaggagagcagcccaaagatgcttcctttccat

SEQ ID NO: 69 - DNA, 2221 bp, Nicotiana tabacum
tcaagatcttattacaacatacttctattacaatatctttttctttttgtaatggctttgatccttggatggaaaatactatttatccttctttttgtgataattgggatgtgtacatctcaagtcacttctcgtaatattcaagctttatccatgttagaaaagcacgagttatggatgtcaagtcatggacgtacttacaaaaatgaagcagagaaggaaaagagattgaatatatttaaagagaatgtgaaatttattgagtctttcaacaataatgggactaaaaagccatacaaattaggcatcaatgcatttgctgatcttactgcagaggaattcttgagttattatactactggacttaagttgtctaattcctactctcaaattcaatcatcatttaagtatgaaaacttgagtgatgttccatctgttatggactggagaaagagtggtgctgtcactagaatcaaacatcaaggtcaatgtggtaaggcacagtttcctattcaagaaaagtttcatattctcttcttattaagtgctgacgtaactagtaaagttgatgatatgtgaccagcaggtcacgggttcaagtcatagaaacattctcttgcagaaatgtagggtaaggctgcgtacaatagacccttgtggtccggcccttccccagactccgtacatagcgagagtttagtgcactgagctgccctttttattaagtattgagaaaggatttaagtaaaatactacatactcctttcaaatttgtgatcttaaacatgttttatcattgtattataacggagtatcactaaggttaaaatgagaatattagaagcaagcatactaaatataaaaatacattctttctgtaatagactaaaatggaaaataagatatgcatagagtactctcttcttgtccaataatgttgacaaggcacttaaattatgagtgtgtgaagtctcacattggtaactgaaaaaattaggagtctacatataagcctacatataaggtttagagtttttttatggtgtgaggtcttttgaaaaaaatcgtgcggacttaatccaaagtggataatatcacactattctaagagtatctttgagctgttttagctcaacaactcgtatcagatcccaggttctgcggacgagcatagcgatggcgacctgtggatcgtggtaatagccacatgaaactggttcgacggggagacccgtggatcatgatcatggtagtgagccacataaaacttagttcgagagaaggattattgggtatgcaaacaaagtctcacattaatagctaaaaagtttgggagcctgcatataaggcgtagagaacttttaatattgtgagtccttttggggaaaccgtacagtttggccaaagcggactatatcatactaagttaagagtatctttgagccattttagcccaacaaatcatatatgataatttaaatttgttttacactaccaataatgtatttgacctactttgcagtatagttactatttttgtatgtttatcataaaagttaacctttaaaacaatacaagtgatatgatttgtataaatatgtgcatagaacttccaactcattaataaattgcatgaaatataggatgttgctgggcattttcagcagttgcagccttagaaggagcaaacaaactctcaacgaacaacttgatttcactctccgaacaacaactgttagattgcaccaccgaaaataacggttgcaacggcggtttaatgaccacagcctacgatttcatcattcaaaatggcggcattgccacagaatccaactacccttacgaggaatatcaagattcatgcaaaagccaagagatgaactctgcagtgaaaatcaatcgttacgaaactctgccctcgactgaatcagcattgttaaaagccgtagctaaacaaccggtctctatcggtattgcagtgaatgaagattttcatctgtaccaaaatggtgtttacaatggaaattgcgagggtcaagaactaaatcatgcagttactgtaattggttatgggacagaaaatgatggtacaaaatattggttgatcaagaattcttgggggacaagttggggtgaaaatggttacatgaaaattgctagagatactggaattgaaggaggtctttgtgggatcaccactttagcttcctatcctgttctt

SEQ ID NO: 70 - DNA, 7192 bp, Nicotiana tabacum
tcataacttactgtgcacgagtttatttgaaagacgttcaaccttgccaagttgagttgcactcttcagcatcgcctcgctgtcagctataaactttgcaaacttagaaccctttgtatcaccatcactatctcctcgaggaagcattggcagatgaagcatagagggactttgcttggaagataaaggcggagttaatgcccacacagaagaaagctgttcatctggtttgtcaagatattccaatgatagattctgcatgtctgtcaggaaaaacaaaacagaaacatcagacgttggtatcgtgcctaccaagtgttattcggaacagatttcgtgagagttgcgaaacttattaagagcttacggatcaaagattactgcttttattcttcatacgggaaaaaaccacccattatctgaaaatggaagtatcaggaatagtcgaataaagtaccttcagcaaacttgaagatgggctctaaagctgcacatggaatgctgaagttcaaatgtggaatgaccgtccctccaccatgtctagcattactgcatcaaaaataaagctacaagacatgaagtttcaacaagaaagacattaatcgatggaaaaactatagaaagaccatgatatgtgaagattagcataaatgagatgactgaaagatcttccatatgagatcattcaaattggacaccattatttttttcctgtatgcaaagcgtataattaatatacatttttggtaaggacaattaatatacattcaaacaggaatatctttcttcaaggacttctcaaagtactccaggacgcagtgtaccacaatatcattagattgaacttcaagaacaaacacacgtaaacatacataagctgaaaaagaaatatcctcaattataagcatccccagttgtcatccaaaagttaattaccttgttacaagggcaatcatgtgtccttctgaattaacaacagctccaccactaccaccagggtgtacagcagccgttgtttcaagcattgccggaaaatgtcctcctaaacttgattggttgagcagaggccgctttgcttcaactaccttagctattgcacccacacaagcagatggaaggaagtctatattataagaaaaagtaagacaaattacaaatataactaaagatgtctaaataggtatgaaacatatgaaataaatatacggtattatatcatgttcaaaatgaaagaacttaacaaaattatttacatgaaaagctatttaacctccagagcaacatgatttagtactattgggcgcacaaagatagtcagttccagaaaattatgttcagcaaaggttatggaacagacaagttaactttatcaacgaaaaaagatggaacagacaagttaagattgcatcaataaacaatagtagcacttccaacaaccaagctactattaaaatatccttgagatacagccgactcgattaagtgagttaccaggaatttcctattttaaaaccccattctttaaagctgatcatttgtacttgctttcaccatagaaaatatcaatttaatgctccagaaatttacctcttttcgtgataagtgacttcaaaactctagatttgattccccaattccgctttgttagcataggtattaggtatatgatcattcttatggatgaagatctgaattagtgcctatggcttttattagcccacgaaaagaaaacgcttttttgttttttaatttggtctacctttctccttgttctactagccttgtttgagcccaacaacaacctcgctattcttaatctgacaagtgcaattttttttaaccggaagatcaaaacgttaacctggactacaaatcaaattcagtatcaataaacaatgtcttcacctaaaagattacccagttttgagccctcccgaccaatctggttactatttctccactggaagacacctcaagttcccttgcggaggcatcgacatcacctcataactactcaatcagtcatcaaatggtcatcatttggtgaaggaagaaacatcaagtattccagcagtaacaaggacatgaaaatgatataatacgacccaatcctgcaattgattataatgacacttcaacaaattcttaacacgagagaagcaaggtggaagagagagaaattcaagataaacaaagattttgtagaatattctaaaatttcagatttactgtgatgcgtgtgtccaaataaaagtaaaggcacaaattttttatttagacaagaacatatctaaagcaagatttaccacatcgtggtccaaatagcccatgtccgagaatgtatgcttttgatccgggggatgggcacatgaagtcaacaataatgggacagagctgatctggaactagctcaagttgtagtaatgcaacatccagaggtcctctggagacatgaactacctttgcatttgtccatacccagggatccataaaatccaagcgaacacgaatggtcctactgcctgtgtttgccaggttaactctaaagctacattgctcattgtcaaccaagaaatgcggagtttttagttccttttgaatcaaatgtttattcctacgctgaatgtcaaatttctcaacccctggatgctcagattgatcagaagggatgagaactacatcagatttggtgttatatcctgaaccgtttacagatgtttttccaaatctccatggctctagaagatgagcatttgtaagaagaagaccctgcttgttgagcaaaactccagaagcccatgctccatcatcaacagcgataagacagatagatgtcattgctttctcaatcaaggatgggggaacaggatctatttggagatgctcttgagtatcattggcatgtccatcctgaatattattggagaatgattcttttttaacgctgattaggtttccattaccaaaatggatctttctcctagtttgtagctcttctttaagcaggctaccacaagcagatgtaatagcttcccatggaatcaccatctgccacccaatgcttcaatttcaaattaaagcaatacatgtgaatgtagatctcagcaagaacatagagcacattatgaaatgtttacctgaatttcagcagcagtagccctttgtctgagtggccgagacagaacaccaataagctctgcatgttcccctaacactgggctaccttccattcctgaaacataaggtaccatacgttatcaggtacccaaagatggaaaggattaattaactaaagttgcaaggcaaaagctcaaaccagggagacaacggatgtcagcaatcaacagtgctttattctgtggactaggtggatagctgtttgcaatggacccaactgatatgctgtatagcaacaaaagatcaaattgagctttcacaaggagatgtaacaagaatcaaagtgaatattaatcctatgtatgatcacaacttggcagacaaataatcatcgaacaacatctgcatacaccagatacagcttatatagcttactcaagtaaagatgagctaaaacatctttagcactagcaacaagaattacaccagtgctttcatattcagatagtctattaacacagcacaaatgttcagtcatcatacattttgatgctgacaagcaaggatggaaagattacaagaaagttgtaattccaacatatgatagaaacaataccaaagcaactacctgttgaaaaagtgactgggagacaagataccgaaaggagaacccatacccagaagaagatcacctctcctactccaggtagccacttttaatgcaggcaggtcctgaaaggaaatacctatgcagtcattatcatcaaaaacctactaaatggagctttcaaaaattaccagcaaaaaagcaagcccattcagcaaaatgcaatgccatgcttcatttcacaagtttgatgccacttagtgcagtaaaagcctgaaacctcatatggatttgaagaaactctgagaagagcaattcttgtagttgatgttcctatcacacttggcaggctggactgcgcctccatcattggagtttgacttgggaaagaaattttctcaacctgaaattatcagttgacagttcctgttaaaaaatagtcaatctacaaaatcaatctccgtggtcctttgagactagcatctcatagacctttggctatgaaaactagaatgctttgtgcaaaaattgtttgggccatcttgaacatagtactagggacaattgagatgccaccgttgaagaacaccatggtaagagttccttatgtcatgccattttgcacttgacagcgtgagactcaaatgtgctcctttccaataacactgccgaatgcttataccattacaaatatgtaaccagagtagcttactgagttggagttcttaatatgaattattttaagaaatgcctccaagttttacgggtggtagactaccttgtattcagacacgggaaggtgatattcaatcattaatctttgaattggaattaggtgttgagacattctatgatgataaagaggcaactattttggcatgagtagagacatgaaacaatgtgatgtcactctattgtaaatatagggagcatgaaataaggaactcattacatgaatttccattattctcctataaaaagaggttacagaacatataaaaggttctgcttggaaacaactcaactgataatgcaattaatgctaaatatatggaggaaacttgcatgttccacaactcgaagaagtggtgtgcaacatatattagttcaaatccatactgctcttatgccagaaaagagaagaaaaaacagaaccctgaaagtgcaaagtggtcatgattagacgtaagacaggaataaaatggcatttctgctcaaaagaaataggtgcttgatttatttagttatttaagaatgataaatgatatgcctttcagttgatagaactttaaagtgttagcctgataaaattatagttatttgatgaagtcttttgaaatttgaaccacaaagtgggatcatagcagaagttagctcatgaaaaatgaccaaggatctacagcatccaatcaaaatatgcatgcaagagaatttggcttatcttggtctcggcgacatttaattatctttgaatggaagtattgtcatgttaatcctatttatgactatgttatgcattaatgaaacaatcacctaattcaataataacacagctagatagtgtcaggagtatttagaaagcgagtgagaggctcggacacatctatcaataggttgtaccaatcatatatagatgaagtacagagactatggttacatatttactcattaatacataaaggtacagagattgttattgggtacacatttactgcatgtaagtgccaaacagaggaaacatcatacctgtgtgcgcttagtgttagtaaatgattgacgggaatttccataggcagctagggaccaaccaacctcccacccatgttcaattgaactagacgaaccttcaactagggactggacagcagcagatgacacagggatgtcaaccttcagcaagaacaccaaatagacggtgtcaagtgcaacttttacgttagatcagtaacaaaatagcgacaaagaagaacaccagccataaaagtgatcagttaacccatgctaaaaactaggataaagttcaaaactaggtattccttctccattttatacggcacactttcctttttagtatgttccaaaaagaatagaacccttctctatttggaatatcttaaaactttaaacttcccactttaccttaatgacatgctcttatagccatagaagtgttatgaaatgtttaaaaccacaacttctaaaggtaatttggtatgtgtcaaaatcttttgtgcacgggcacaaaacaccagatgacatcaaactagaatttatatgcatgcatcaaaatgagagcacttatcaattcaatattgcaaataaaaaacatatataagataaagtaacaggttttatgataatcagcattcagattacaaaatcctttcagtctcctactaaatcctaccactcttaggagttctgcaggtagccagttcaaaccctctttgttggtcactttgatatcattttgcaatgtatttcctccctgtgaaccacgagcaggacatccaatgtcaatttaatatatcaatgaacctaaaaaacgtattttcttccgtaggctcaaataaatacctcccacagtatatcaatttgagcaccaggaatcagctccggcttatcctgcaagatggtacattgtaaaagaattatgaaaaagcataacgacaaagaaataatcatgttgttccattttatactacatccattcaaaaacctacctttctatacatagaatttttttaatcttgtaattctcattttgcacttaatggcatgctcttataggaattgacatggcatgctaaagacaactagataacttcttacacatgtaattaaatatgtgacaaaagtggttctttctttattaaactccttctccaatcaaacaccatcatataaagtgaaaccaaacagagggagtaattatcaactgaaagaagactaaagatccaaacctttgatatgtcccctctatcctgttgtacaacaaaaggctcaataacagaagcaactgttaaaaccaagaagtgacctccaaaagagtgcaacttgctttcaccttgaatctgcttagacactgaagcattaacaaaggaactgggcaaaagcatcccagatgctgatagtgtcgtcttcccagaactacaccacaaaattacaacccaaatttaaaactttcagttcaaaacacataacataaacaactataatatagagacagagagagctatgtaaaatcacttacttgtacaggtggaaagcatgttttcgcatttttaggcctttagggtccttcaagaagaagaatttatttgtattttttcaaaaattaattagtagaataagcaaagtgattgaaaattacagtatcttggcttaagaaaagggactcactgggccttgaattctgaccatgacggcataattgcgggcaacatcaaccacttcaggaagacccat

SEQ ID NO: 71 - DNA, 11168 bp, Nicotiana tabacum
  misc_feature (2418)..(2418): n is a, c, g, or t
atggataacccatcggaggattcctcggattctcctcaacagcagcccgaatctcctgtaaacgatgaccaacgtgtttatttagttccttacaggtaaaatctcccttccccgttttgacccattcctcatgcaactgtttgtttatgtatatcaacataaaagtaaaaataaataaaaataaagaattgaattctcggattttgctttcccaattgattttatgatttggtttgatccaattcagctaaacccgaatctgaacccatgagataacgagaaagtcgaaacaagttctagttttttttttcttttttctttttgtttaaattacttatatttttatttgtattacttgtcatttagattggtaattgtattagcttccctacattggaatgttgtagtttttttaatcaagtcttattatctggatcaaatcgtgttgtgagtttttttattttttttattagttgccatttggattggtaattgtattagcttttgtacattgaactagtgttggtttttaatcaatgttgttggtttttgttatctgttaaccggtggatcaaatcatgttgtgggttgtatatttttgttttgtgagcttaagcataagaaagtatcggccttggattttcagttgtgtttttttgatgaagtaaatagtttcaccaatgtcatcaagaagatgcaagtattacgaaagattaggccagagagtatcagcttcaattacattggtctagattgctaaggagctgataaagtccagaaagttaacagggtaagttacaatagatagttttgccaactaaataaaagtaaaagacacctagctatcagttgttaacaatggagaagtagtatagcaaagtgccggcaagatctgaaagtggtggttatagggacctgtttaataacttagtaaaccttagaagaagctgacaaattgttccatctacaatttgtcaaccttaatagaggtgcacacaagctggtcggacaccacggttatcaaattttttgtttaaaaaatgttccatctcgataaaatatcaattgattatgcattatgttgtcagttcaaatattgtttctcgcaattattataaaaagtgcatatctgtggagaagtgctccgcgggctagtgcggtggtaggggagagtggtaaaaatgacacaaatgatgctttccacttgctagtggttgttaagaagagagagaatgtttgagcgggaaggacggggtaaatagcatggaaatgttaattgaaagaagttaaaagttaccctttgcagcatcttctctaggtaagaattttttgtctgtgttttcccgagtagagggttaaagtgttgcacacacatatattacaggtgccacagacacgtatatgtttagagtactatataagaaagcgtgtttgtgttctaggtggtggaaagaagcacaggagtcatcaccatcagatgggaagtcagtgactttgtacgcagcggcaccagctccatcttatggagggccaatgaaaatcattaacaacatatttagcccagacgtcgcatttaacttgaggagagaggaggaatctttatcacagagtcaggagaatggtgaagttggggtatctggtcgggactatgctttggtccctggcgacatttggctgcaggcactcaaatggtcagtattttagagcagtttccaatttgtattccttgaagtgtgttagataaagcctcttctgacggagatttacgccatagttgttgagcattctgaggataccatttgcatatgtgtttttctcgacttcaaataaaacattgatttttcacttctggttacaacaaccacttgcaatttgttgtttggtttcttctgcttttcagaccattcacattttcatttcacatgaaagaggcctcaagcctttcgaggcttcattgttgttgctagtccgatggcaattcccagttataaatatatattgttaaatgccttgtgaatgcatatggaagctcgttttttaaagcattttgagatttcattctaaaaagaccactgtttattctttcagctttaaagtgctaagctcaatctattaattcgcttccttattttctttgtctctttcatatattttttttgtgtgtgtggggggtggggattggtgttaacttataactgattatttcactttcctttttggtgtttttgcacatctaagaaagggaatttgtcttttgatcctagtaacatgttatttagcacgttaatttcatacatctggcactatgtaaaagttgatcttttgattatagagttctgattagtttgattggaattgctcctttccatccaggcacagtaactctaaagctgcggctaagaatggaaaaagcttttncaaaattgctcctttccatccaggcacagtaactctaaagctgcggctaagaatggaaaaagcttttcagctacagatgaggatattgcagatgtctatcctttacagctgaggctttctgttttgcgggaaaccagttccttgggagtcaggataagcaaaaaggttaataataactttggaatttctagtttcatctacaattcccatgagatttgtactgtcataatatccatagagtgcataaccacatgtgatctttttggtacagaccttgccacaatttgtgaagctgactttctttttcatcagctgctttgccatctttcatccttcacttttgttgttgctgtttattgttgaaactgaaggatctaagatggacaagtccaaaatatcaactttaagaacaagggttatgcatgaagccctctattctcatcctcatattaattactcggaatgggcatagctgttaagtgcttccatttttgtttgatatttaaatattaacagtaagagctttttatggttctgggttgtgcaaaaagaggacaagtatgttagctggatacgtatctttttgctgacaaagtgggataaattttgcatggtaatttttggctttacatgaatttgttgacaaggatatcaatcctattgatatttatgtaattcacttgaagcatttaatacttctatttcccaattacagaattgctcatcagcaatttttgaccacagtgagttctagagaagcgagtcttttgaaaatgatagtagaaagagcgcttcctttctctagattgtctttctagcaaagtaaattaatctagagttaaattgtattgacaggaataaacaatataagcggtattttcatccagacacccctcccctgtttgtggagcagaaagaaactatgtaattgggaatcacttagttttgagataacatagtagactatgtgacagttttattcttttaatttaaaactaacaagttgtcttatatctaaagttttagcagaatcatttattctgcctctaatagcttggaagaactatatatcatttgaggtctttacttgccgaaagacatcggagatgaagttagttttttattagatcagatatgaaattagttctagcttttttttatatactcaaggatgccctgacttcctccatctttatctatttttgagaaattctctttcttgactgccaaatgctaagaggaaatggtaccaagcggttacatgcaaaccctggtctgaagaagtaaaatagctagagttctaattttcataaagctaataggaaataatttgatcacttgtgaaaataagccaaaagaatgatgctcattcgaacaaagttctcttagagttactacatatttcgttgtgtatacatgatccttcaatgctacttcatatttattatttacccgaaagttgatgttaatttgagctctttttttcttaacaatgttattgctgacttgtccgtttactgcctcagcttgtgtacataaaaatgtagtttccaaaatgttgtttgtattttgtaactgttgcatgttaaacatttgcaatattgcggtggacaacgtttctttttttttttcttgcaataatatcctcaccgatgttctttttttttttttaactatcctcaccgatgctttggagtcagttaagctgctttatttcctttagagtctagttttacatttgtcttctcacatttgattcaggacaatacagttgaatgctttaaaagagcctgcagaatttttagtgtcgatacagaacccgtaagtttcaatactgttgttaatcaattgcaatggtatctctttcaggagattaatggtattttggttctctgcagttacggatttgggatttatctgggcagacggcattgtttttttcagatgaaaacaataagatcctcaaagactctcagaaacagtcagagcaagatgtatgtactttcaactgtgtcatacttcatgactaaccaataaacaagtcgaccaatgcttctgcggcattcactatttttcctgtctttactaaggaaataatttagttatgcttttttctaattgttttctaattaagtgtttttagcagatttttccatttctttatctagtgtttgtgtcgtaaaaagatatataatgattgaggtgatgaatatgcttacttaacacttcatctaggaatgaagtgagacaatgatttttctccattttctatataagtgttgttttttcttgagcatggacaatgctaagcccaccaaaattcagttttatgcgactctctttcattttagggttcgttctggagttattcatttataagcagtagatgtgctctttccttgtactttcaatgatgtacactctaagaaactttagctcttttattaccctgggacaaaagaaacacataataaacgggactgtcatgtctaacgaccagcttatacacccattcgtcttggagaacaggcgggtaaattcagcttagttatgctgtttttcagctggatctaagattacaaaaagagcaactgttttgttttttgtttttttccatttgtggcagttattaccggtgtggttcatcattgattgtttttgtattttcttaggctgtttatctgtgaaacaaattgaaagagatgccaaagttttatctgttttatgtttcttttttccttgtgggttaccatttaactgagagcaaggtaaacctttactgttgaaggcattttgctggttatgggttgccttatagtcttattactgactcttgaattaactctagaatttagtgtttaatggttcgcaccgcttgtaagcaagaaatgatttggacaaacttcttattttgtcctcttatgtttttgcttgcagatgctcttggagttgcaggtctatgggttatcagattctgttaaaaataaagtgaaaaaagatgagatgtcaatgcaataccctaatggttcttcttttctgatgaatggtactggcagtggtataacctctaatctcactaggagcagttcttcatcattttctggaggtccatgtgaagctggtaccttgggcttgactggattgcaaaacctagggaacacctgtttcatgaacagtgctcttcagtgccttgcacatacgccaaagcttgttgattactttctcggggactacaagagagaaataaatcatgataaccctttgggaatgaatgtaagcaatcttgaatatttcaagatcattacgtgctgctttagatgttttcttcagttctctctgaataagtcaatgttgacatcccttaacctattctacattatatgtggttggaaaagtaaaagaaaaagagaaattcatttgattactctccaggtgaggaattctttatttacctccaattgttttgttagcccggacaaaagaaaacgatatgcttatccgttccattcaatttagtaggggttgagaaaattgactcggagggtattcaatatctccactttttgtttcgtaccaaacaaggggaataaactttacctcttttacttttcctcctccttccacctcatctcatcccaatcaaacattgtgttctaatctgtctccttacatattttattgtctaagttcctctctttaaattctttcagggtgaaattgcatctgcttttggtgaccttttgaagaaattatgggctcctggagcgactcctgtggcacctagaacattcaaattaaagcttgctcattttgctcctcaattcagcggctttaatcagcatgattctcaggtcctttcagtccttcctgttggatttagtttcccagttttaggtcacttattaacgctctcttttctgtcctctcattttgtgggcatcttttgacatctaattctcctatttatatctgcaggagctcctagcttttctattggatggactccacgaagatttgaaccgtgtcaagaataaaccttatgttgaagctaaggatggagatgatcgtccagatgaagaaattgctgatgaatactggaataatcatctggctcgtaatgattccatcatagtggacgtttgccaggtaagtaacatccgatggtctcttgtatctcactagaagtaggaaacatttgatatcaccggcactcagtggtctctcgtctctcacaggcaaatgtgaattattgatctcatttcaacattgacttgaaaaagcaagaagaatgaagtggcatattttttaaaaatatctgaactctactgtatttgtgctgcgagagttgttctaggatgagagagtaattataccccaactgtttggggaagtttaaccagtgttcctaaagcttgcttcaaatttctcagatatttttgtctagattctctgcctttttcatcaataagatttcttaccttactcaaaagaaattgtaagtaatggaaattgaattcaactcttaccataagtaatggaaattgaattagtcgtccctttcaaatcaatccgataaccaacttggttcaataattcggaatagtgggagtactatttgttaacaactgacatactattttcctagaatgcagtcctgaactaagagctgaattttggattcaggtttattttaaaacaaattagttttatttgtagtgctccctgttttctctatatggtctccgcattttatctttgatgtctttttgagttttactgaaatttcctaaaagaagaagaatattccagcctttaatctccataagaaagttaaatttttgttcttccatagtttacaagtttaattatataaaaacttgaacctaccttatcaaaaaagaaaaagaattatgtgaaaaccttgaacattgtgaatgtttctgacatttgtgcactctataggtgtgtttggaagtaattggtctttttatgtgttatgtagtctatggcggtatgtaatttctaaattcctctttggccaatcatctgtgagataaagctctgcaattctaagataatttcgaataccaccaattgatgatagcttgtcattttttttagtttttttattctgtaattttttgcattaataaagttgactcttagccatgtctatcattagatgtcgtaaattttgaaatttcactttagaaaccatgtacatagtacatgtttcctagcaggtcgtgatttgtctatgacttttaggaggatttaaaagtttacttcatctgactccctttttctgcacatttatacaagtttcttttctagtcttgcttctcagagcttatctcgattgttgcagggtcaatatcgttccacattggtctgtcctgtttgcaaaaaggtctccatcatgtttgatcctttcatgtatttgtcactgcctcttccatctacatctatgaggtcaatgactgtcacagttataaaaaatggcagtgatattcagatatctgcctttacaatcactgtttccaaggatggaagacttgaagatcttattcgtgctttaagcactgcatgctctttggacgctgatgagacccttttggtggctgaggtaaagtgcagaatttccagtgatgagaaatggttatggatttcaagttgttgctttattgtttcctaaatagaacttattacatactgtgtattggatagtcaagtagagtcctttttcctatttccaaaattttatttccagctcttgctgggttgttgttgttgtatttccagctcttactccatttaatgttacagatatacaacaaccgcattatacgttatcttgaggagccagccgattcattatccttaataagagatggtgaccgacttgttgcttatcggttgcacaagggtactgaagaagcccccttggttgtgtttacgcatcaacagattgatgagtatgtcttgacttcataatttgggcattatctttttttgctttaaagttcatcaaacattactagccattactcagatgtgtcttgcatgcacagctatgtttcataagtaataagttgggggaaaaagtactccaagggtggtgcttccacatcatcactcttaatcatggcagggtttggatgtgggcgtacttgatgactacattgcttaaaagaattgacaaaatattttcgcagatgacatatgtagtaatatctcagtctattagtttgctttatggagatcgggtgattaattcatgatcgacacaactccagttagttaatagagtaggctgttagttgtcatatacttctatcttgtataaagtaaaaatgtgaggtggtttatttagtactgttgagcatcctcagtctcaattcgcttcacttgaatacattacaaatcattgttatgcatggttcgtcgagcaacatgtagttcagatgatgtgtgtgatccttctagattatttggacaatcatgaaactattgcttcttccatgcatcttactgctgaagctgtatatgatatggaatttcatgctgttttgtttgctgattatgtttagtttaacttttgatccattgaaagattctcatagtggtccttgactcattaaatgagatggctgatatttattttggcaaaatatcatttccttcttgatttcctcttccattctagcaatcttatgaagactgcatgtgcaggcattatatatacggaaagctgacctcaaacatgaagacatttggcattccgcttgccgcgcatagtagagttcttacaggatctgatatccgtagtctttatctacagatacttacaccattcttagtccacaatacagcccaagcagataatcttaactgtgatagaagtgctactgaagcatgtacagattcagaagtcatcacagacatggaacctggcaactcaatagtaaacggggttccagaaagcattgctgaagaagatactgccgaacctttagacatggaatttcaattttacctatcagatgataaggcaacctttaaaggctccgagattgtaatgaatgagccattacagtccacagatatctctggacggttaaatgtacttgtaagttggtcacctaaaattcttgaacagtacaatacaggccttttcagctcactgccagaagtttttaaatctggtttttttgccaaaagaccacaagaatctgtctctctgtataaatgtcttgaggcatttctgaaggaagagcctctagggccagaagatatgtggtaagtatgcaactccctcacttctgtgattgtacaccattcatatgcaagctatgtattcataacatatgaaatttctcgtaatgcttccctttttgcttcttctttggtttgtgctaatattataaaccctcaacttttgtaattacataattgtatttttccaattataccattttatttcatttctgtcaatattttccaccgcgtcgtgattgcttattgtggataaaccattcttattagcctcccctcaaccaaattggaccttgactttgcaacatggcatgagtagtatccttccaacttctagttcagttatgttaaagaaacaatgacagcatctgatgatcttatgtagcacctattgattttctgcacattgtgcttctgaaatgctttatgtgttgctctttgtttcttgtatattcatagcaactacagacagtaattgagataataatattcagctatttacctggggccactcatgggaggaaagacttctttcatgaaatgtttctagtattctatcttatcatctaatcatttatttgtgtcattcgcttgggaagtatgaatataatctgcctaactttctttgtcttatatccaacattaggtactgccctgcatgcaagcagcatcgccaagctactaaaaagttggatctttggagactgccggagattctggtcatccacctgaagaggttctcgtacaaccggtttctgaagaacaagttggagacgtatgttgacttcccaactcatgatcttgatttatcctcatatttggcctacaaggatggcaaatcttcctatcggtatatgctttatgcaattagcaaccattatggaagcatgggagggggtcactacactgcgtttgttcatgtaagtggtgctgcgacttggattaccttgcttctttttcttggttttgtttctattctatggtaaataggattcttttatacctgataaaaatggcatcttaagatcagtacttggggagaagggtgggtggtgggcggtcactgaaacctacctccaagggcaaatatagaaatttcctctattggtcttattcttattgttcgtagtgagtgttcctttgatgtattttttagttccaatgcatcatctgcatctaaattaatcacatattgcacacatgtgcatctattatatatttaactttggtcatgcgtcttcattttttttatttcttcatcatgaagaatatgcaagaaggtcaaatattcagacttttacagtcttcctagtttaatccagatattctaactttgtgtttttcttcttctaataatctagcaaggtgctgatcggtggtatgacttcgatgacagccatgtgtattccatcagccaggacaagctcaaaacctcggccgcctatgttctattttatagacgagttgaagaaatc

SEQ ID NO: 72 - DNA, 1350 bp, Nicotiana tabacum
ttacacttgcctactacactctcctttgccaaaacctactcgtcgatttctcatatcaaattctacccataaattttgctggtgaaaattaccaataatattgcttgctattccaagtgattctgaccgtccgattccaacacaatggatcccaccttctacttcatccaacatcctttccttattgatcaaaatatcaaccccgttttcaaattgcaatgtcatatcacctatcaaccgtccgatttcgatcggacggttatcgaagcacatgtcgagtgcaccaccataaacgtaaccttttttcaatcttggacctactaacctaacaatttcttctctgaccttattgtacgcttcttccactaagaaagtgtactccgtgccggaatcaatgatcgtctggccggaaccaccagcgtttggccggaaaaccctcccggagatgtttaattttttgccgccaatttttatccccaccatgccaacagtaaaagctagtggatccaaatttggcatgcgttgactttgaggaaaagtcaaaagatttatgtattgaaatgtatgggaattagggttttggcctaggtaaaatgttccactaggtttaactgcatggctaccttgtctaattggcacgcaatatgagaatttttgtaccttagcttgggaggcaaaagaaaaccgtccaagattcattcccaaaataccctcagcatcttcggactcggtcgcacaaccaagaatcaaaggaggggtactttgggaacgtgaaaatgtaattttttcacggacaagattaccctcagctaaagtaccatcagcataaaagtaggaatagtggcacaaacgattttggtcacaagtagttggaagggtaaaatcgggaattcttggcttacataaaggatgagtacaaggaagaacagagaaagtagaagacaaagaaggatcaaacgacgtcgttggtgggggtcttttgggaattttcttatgacattgaatccaagaaagttggctaccagtgtccaaaaccatttgttgattttgtggtggtgttcctattggtagtgtaacaattaaagccattgaatatttaaaagttgatttatagttcaaagatggaattctagacatagtttttgtattttgagtttgtcttctattattagaagccataaaagaagaaagaaaaagagctttagaagaagagttatgtgataaagatgttgaaataagaggaaatgacatagaaaaaggcttatgtttaatggttttttgtgctgagatgtagagaaaattgaagattatgagaagaagaagaacaaaaactctagaagaagaagccat

SEQ ID NO: 73 - DNA, 5874 bp, Nicotiana tabacum
tacactataattatattttcgttaaatatgaagattttttccatattctctttgcttcttctccttctccttcccatcttggcttcatgtcatgaaaaacaggtacaagcatatacaattctagtttctcattgattctttaatcgcagttctacttctgtttattctttgttttaattatggggttttgttttgcaggtttatatagtgtattttggaggacataaaggggagaaagcattgcatgagattgaagaaaaccatcactcatatctcatgtcagtgaaggaaagtgaagaagaagccagatattctcttatttacagttacaaacatagcatcaatggctttgctgcacttctcaccccacatgaagcctccaagttatctggtataataaccacgaaaaaagttcactctttcaaagaaagagtttaagttacatatagtaaaatttaattggttatagcaggttattgctctattttctaggtcagagtaacttgttttcatatgtcaaattaatctgatagtgtaaaaaatcctgtataagaaacacaaggttcttgtatgtagaagaacttaccttatgtattatttgaacacagaattggaagaagtggtatcggtgtataaaagtgagccaaggaaatacagattgcaaacaacaaggtcatgggaattttctggagtggaagagtcagtgcaaccaaattccttgaacaaggataacttgctactgaaagccagatatggcaaagatgtcattattggcgttcttgacagcggtacatacatatatatttgcttaccattatttccaatatggcattattttccctttgttttaaattttaaatgtatttccacaaagggctacataatctagcatgtgattatcgtttctccaatagtgatacagacaatcttattagtaagactaatgccttgtatgtataatagtagaaagggataacacgtgaggaatcaacctatatatatatatatatatatatatataaatgtatttcaaaaaatactacttatagacatataaggaaaattgtgagaagccttgtaccaaagggagtctaaagttaaaataaaaattcaacatgtttaaggattatggttatataggatggacgtgtaactgtgtctatcctccggcttatcactggcaactgaacacgagggttgcgctcgttgcgggactcattaattatgagattatcaactgtaactagtgttaattgactagtctgatacttaaaaaaaaattggagtatgatattatgtgatgaatgttgttggatgatttaccagggctatggccagaatctaagagctttagtgatgaagggttgggaccgattccaaagtcatggaaaggaatctgccaatctggagatgctttcaactcttcaaactgtaataagtgagtgtaattcctcttccatatgttttatatctttcctttaactttttctttctttctttatcttatccctttttattatctcgatgatctgatgtctacctgttttacaatgatttaatgtggattttagccattcttgggttagaaaatgttcagctgctctacaaccctagaccacattctttttgttttgggaattcctgctaaaataagctgatttactaccttagacgtttggtttatcaaatataccaacctatacgtatttctttatttttctttttttaataaactttattaaattttataaggctgagatgactttgaacgaaaaatatgattcatttagtttaaatccaacttatttggaactggcataatagttgttgttgctattaaatttcataagtaggcttaataaacatgtcatcaagttttgtgcgcacctatcatatgatgccttgtttatccaattatggatttcaggatttgcttggaaatgaagtgtttggcacttatctcttgtctcttatacattgatctaacttcgtaagattaattgtatttaaatggcttgtaatagaaaaggccaaaggtcaatttcaaggccgatttttggaagttttcctttgtcttctttatcagttgaccctaaaccattctcataatttagcttaattaaaatcaattaaaagaaagcagatacatgtttagttttttaatcttgtacctctctaaagagtgaaagagagtttttttgagaggacaggacccattgggtgtccatgcctgtcctttggtggccttaggatatcagtgtaataatttcaatattgtccatttcaatcaaaccaagagaggttatgctgacaagttgctaattgttttttggattcttgctttgccatcttgtgaactttgtatccttccaatgctttgttgtgcagtaatttgttttttgcatgtgtgttgtcattatggttattgtgaagtctatagtgaaattttgtgaggcccttacttccagttttgcacggatattctcagtagtagccagtaatattatccattttgactatctcatgacttccatgcagcagctttttgacctttagaaagttgatgatgaaattctaccattttagaatgataagtcattttctagctgttaagtcacaaaaagagcactagagcagtaaaacttttgaagtttcattgtgaggttgggaggagtgggcctgattatcacattcttgtcctaatttgttactgctactatccttttttttttttcttattaagaagaagaaagccttttcttcccttcttttcaaagggtagggggtgggtggaatatattagcctaatttgtcatattttccttctcgtatataaccatgctactatatatgttgtactcaaaatataagattttgtataccttttcctctatatactagatagtgtgatcccctcatgcatcatcttcttttctctagaagaaaatgttttattcatggtgacaggggagggagagggtgggaatgttgggatcatatcttgatatcttgtctaattgatcatctcaggcaaatttagggtggtcatgtgagttaaactaaataattttatttcataggatcagcccgccctgatcaagaattacttactagctagccagactagtggagccctagccggagacattctctaaatcatgccttaacgcgcccatcttccaaataaaaaagggctagttagtaagaaagatggaaagacctttatccataattctttcccagtctacctccttccttaattgtgacatgtcccgttgatcccacctacgagctatctgtctttgcctagcaagataatttttggtctcctattcttgcctatttttatagcctgtctttatcaagcgagataattctagttcttttatttttgcctatcatggtaggaaattggttcggcttgattgaaattttttaaaatgtttacatataaaaagagtacacgcattctgaacccaccaactctaaatcctgaacttgcttctcctaattatgtaagataactttaatatttattctcctatgctactttgggacttctattgcaggaaaataattggagctaggtactacatcaaaggttacgagcaatattatggccctctaaaccgaactctagattatctatctccacgagacaaggatggacatggaactcatacatcatcaacagcaggaggcagaaaggttccaaatgtctctgccattggtggctttgcatctggcaccgcctcgggtggcgcgccactcgcacggctagcaatgtacaaagtctgctgggctattccgaaggagggcaaagaagatggaaacacttgctttgacgaagatatgttagcagcaatggatgatgctattgcagatggtgttgatgttattagcatttctattggaacaaaagaacctcagccttttgatcaagatagcattgctattggagcactttatgctgtgaagaaaaacattgttgtgtcttgtagtgcagggaattcaggacctgcaccttctacattgtctaacacagctccctggattatcactgttggtgctagcagtgttgacagagcattcttgtcacctgttatcctaggaaatggcaagaaatttacggtaacacgataatctattcattttctgtacactatttcatctaaaatgttgtaacactaggatcataacgttttcctttatctatttaattacattcatattggaatgaaattgaatccatttttcgtttgcttaatatcagggacaaacagttacaccttacaagctcgagaaggagatgtaccctctagtttatgcaggacaagtaatcaactctaacgtaaccaaagatgtagcagggtactctccttgcctcaaagtttcaatatttttaattaataatcataattttcttttggttgattatgttaaacactatctgaaactttttcaaaaaaaaaattcaggcaatgtttaccaggttccctttcgccgaaaaaggccaaggggaagatagtaatatgcttgagagggaacgggacaagagtaggaaaaggtggagaggtgaaaagggcaggaggaattggttacatactaggaaataataaagcaaatggagctgaattagtagctgatcctcactttcttccagccactgcagtggactataaaagtgcaatgcagattctcaactacatcaattctacaaagtccccagtggcatatattgtcccagctaaaacagttttgcattctaaaccagcaccttacatggcttccttcactagtagaggtccaagtgcagttgcacctgatatcctcaaggtcagaatttacataacaaacttaagatatttacctgacttatgatttatgcttcctcatctaaattaaattctgattttcgctacttccacagcctgatatcaccgcaccagggctgaatatattggcagcatggagtggcggatcttccccaacgaaactagatatcgatgatcgtgtggttgagtataacataatctcaggtacttccatgtcttgcccacatgtcggtggcgccgctgcacttttgaaggctatacatcccacttggagcagtgctgcaataagatctgctcttataacctcaggtacctctcaactacttttgaacttaacttatatacactaactacagtattttaacctgttataacatatatagttattttgctgcaggtgacctgatagtgtgtaaacattattttacattgtcggtgtatagaatttaaactcctttttcgtccaaaattttgtattttgaactgatcaatcgttatattttcagctggattacgaaataatgttggtgagcaaataacggatgcatcagggaagccagcagatccattccaattcggaggagggcatttcaggccatcaaaggcagcagatcctggacttgtctacgatgcttcctaccaagactatcttctcttcctttgcgcttctggtattaaggatcttgacaaatccttcaagtgtcccaagaaatcacatttacctaacaacctaaattatccatctctggctattcccaatctcaatggtactgttactgttagcagaaggttgacaaatgttggtgcaccaaagagtgtttactttgccagtgctaaacctccattgggattctctgttgagatttctcctcccgtcttgtcttttaagcacgttggttcgaagaggacgttcactattacagtgaaagttcgaagtgatatgattgacagtattccgaaagatcagtatgtgtttggatggtattcctggaatgatggaatccataatgttaggagtccaattgcagtcaaattggca

SEQ ID NO: 74 - DNA, 21791 bp, Nicotiana tabacum
  misc_feature (1397)..(1742): n is a, c, g, or t
atggcaacacgtagaagctctagctctgctctcacggcccttgcggcgtctcgttcccgcctactctcgcggtttcgtcctgcagtttctcgtctctctcagaatactttactcggcaccggcaggtgtccacctcccaatagtggattttttgttgcagaaacaactgctgcactttggccgaattataacgtgttgtccaaaagtttcgtgcactcttactctactactgctgctagctccggacaggcacgactttcttcttcctaattgcattcttctctgttcaacgacttttcttcttcctaattgcattattctgtccgttcaattggaagtgctaatagaattaactctaattgacgtttagattaaacttgaatgaatgctgttggttcttttatttagcttttgatgcgaagtgaagtaatctctatttagatattgtcagttagagaactattttctcaacgttaaggaacatcatttccagccttttttttttttgcagagtggaagccttaaattgtgtatttttggacgagaaataacaaaaatggtcccttatatgtggggtagaataaaatagtcccttaatatactcctgagcagttttggttcttcaagtttgcaaaaaagtgagcagttttagtagtcgtcaattattttaacaaactctggttgtttaatttgacgaatacgaagtcgcatttggaggtgcattttttgccgtttatgatatatttggtctatttctggtgtctgatggagtttctgggatttaatgggtctttcctagtggttctagttaaatccttttctttttcatagtttcgctaaatctagcagccaaattttgataaacagttgacaagataaaaaatgctcatgcgtggcaaacatagatccttctgataagcgtcaagcagtggaaaacacttttaggtgctgaagtggatttttataaattggcagttacgtgttaagtgagaagtggaactgataatcaattagtatggttggtaaaaaaactgttgataaacactttttttgctaaaataactgtaatgaccttaaagttatttacaaattctataattttaaagtatttattacataaaaagacgaaaaatagaggtaattaaaagttatgttagaagaatatattggagattacaaaagatcatagggataaaatcgtaaaaggcttggtcaaacaaaaaatgtttataaggtataacttttgactgattttggcttacaagttcttctcgtacgagcacttttgatgtttatcaaacgtgtagataagccaaaatgtgcttacaagctagtaggaccctcttatagcttagacaaatacatgtatttaagagtctattttatacctacctggnnnnnnnnnnnnnnnnnnnnnnnnnnnnnnnnnnnnnnnnnnnnnnnnnnnnnnnnnnnnnnnnnnnnnnnnnnnnnnnnnnnnnnnnnnnnnnnnnnnnnnnnnnnnnnnnnnnnnnnnnnnnnnnnnnnnnnnnnnnnnnnnnnnnnnnnnnnnnnnnnnnnnnnnnnnnnnnnnnnnnnnnnnnnnnnnnnnnnnnnnnnnnnnnnnnnnnnnnnnnnnnnnnnnnnnnnnnnnnnnnnnnnnnnnnnnnnnnnnnnnnnnnnnnnnnnnnnnnnnnnnnnnnnnnnnnnnnnnnnnnnnnnnnnnnnnnnnnnnnnnnnnnnnnnnnnnnnnnnnnnnnnnnaaaaaaataaaagttactacttttgtcattttctaattgttggacaggcggtttcattctactattttttgacaatttcgtgggtcatccttggggtagggtaggctgccttcgtcacacacccttggggtgcgaccctttctcgggccctacatgaatgcacgatgtttcgtgcactggacttccctttgtggagtacactttatcaaagttacgtataaacacatgcactaaactagacttttgtgatagttgtttcacttgaggctgtcagtttacttctttttttgtttggctgctattggtgttgccataaaaactactctagagtttactattgatgcttagaacttatggggtgaatgaaaggacgggtgactgaaaggacatctccttcctcaaacgtgttatatcttcttaaacaagaaattttgatgtactcaaacaatactaaggggggttgtgcagataaaaacagctatttataaaggtccattggtctccctggccttctctagaatgaggagtgccatgattgtagatatttacctataccatatcgccatttgtcaattctcttggatttgtcctgatgattacttatctttaattttgggtaattttaaattgttttggcatattatttgttgttatgttaattagtatgaagatttaacagattaataatatggactacaccgagatggctcttgagggtattgttggtgctgtagaggcggcacggactagcaagcaacaagtagttgagactgagcacttaatgaaagctcttttggagcagaaggatgggttggctcgaagaatattcactaaggctgggttggacaactcatcagttctgcaagaaacagatcaatttatatctcagcagccaaaggtatgaaaaatggagactgattgtggattctgatgagttcttggactagagaatcagatattttttcttgcaggtagtaggtgatactagtggccccatattggggtcacatcttagttctctcctagagaatgcgaagaagcacaagaaagaaatgggagattcctttgtgtctgtggagcatatgttgttatcttttttgtcagacacaagatttggtcaaaagttattcaggaatctccagcttacggagaaggctttgaaggatgctgtcaatgctgttcgtggaagtcagagagtaactgatccaagtatgtatatatttatatagcttcatgtttcgtggccatgtctcttatgatttcattcgttctggttgaatggtaaatcccagttggcgaaaggatcttactttatcacagcatgagatgatccttactttggttgattgggtggatcgtgcaatattgtctctctggtttgtcatggacattaaatttttcctattgatggggtgggggggggagtcttgtaaggtggttagaggcttagagctgataatatttcaaaaagtacttggcaaaaaaggctaattccaagtagatggtataatactccattcacatgaacttagatttaaatctgaatttgaagaatgacttttgatatcaaaaggtagaatgaggaattagcaaaattgcattgagggagtatggatgtccttgatatatatgacaatgcatattactgtctcttagtgactacatcatgaagtttcaaaatgattgaccatgctcagtgcaaataagatatctaattgtgtcaaaatagattttagtatggctccgatatttatcaagatcttccagcggctcttcctgtctaggaatgagtttgaaatctcgatcctaagggtgtgaacatgtttgcaatctgacacgtttgtttactatagtcgtcaaaagcatgctttgtgagatagcaatgcctatctttgattgtgctacctcaatctcctgtaattttctcaaatcctgagccttacagcaattgaacaagtgttgctagagttaagaaactatttggtcattgccttctataataaaatgtcatcaacatagtccactagtaaatacattaaccacattgttgtgaagagcgtgaagtgagaaaaagcgacaacccccatttcgcttaaagcgagaagcgtagcactcacttttttgaagtgaagccgaattttcaaaaaaaaattaaaataaatactgcatagacaacacatgtaattgtaagcaaatgttcaatacttcaatgtaaaaactaaatagtagcatcaattaaagcacaaaatgagcatcctattcttctacaagattgtgaaattcttgtattccactatcattattatattgctcgtcatcttcttcaacttcttcttcttcatcaactagggacaaagtagccgcctcttttcccttcctctgtgaacttgaagttgaggtactccccttcaaaccataaatcctctccccaatttcacacgcctccgcaacatcaccccaagtgaaatcagaagtttcctcaaatacttcttcatctgcatgatcttccgggactccaattagccattcattagcatcattgatgttgtccaaactaattggatcaattacattgcgagcattgtaacgacgcctcaatgttctattgtacttaatgaagactagatcattgagacgcttcaaggttactttgttcctctttttggtgtggatctgcaaataataagtaattagtaagattaggacaattgagatataatttaattatctcaatatactaaatctttcttcttagttcttacatgttcaaacacgctccaattcctttcacacccggatgaactacatattagacttagaaccttaatggcaaacttttgtaaatctggggtgaaatggccatattgctttcaccattcaactgtagaagtagaacaaattttcaaaacataatattgataaattaataacttattaactataaaacaacatataagcactcgttcacctggtgacttcgtctttttttgtctaatcgccatgttttttccaaaagttgctcagcattcctataaatactaaattgctctgttattttatcttgcacggattctttgggtatcaacttctcagtacattcatagtatccattccacaaatgttcatctcctagaatcctctcttcattgtcataaaacagttccgggttcaaaataagtccagctacatgcaaagagctatgaagcttactatcccaccttttatttatgaaatacacttttgtattttctttgatcactaaaagagacttgaatagccttctttgccctatccattgcttcgtacatgtagcccattggtggcctttgctccccatccaccaaacaaagcactttagctaaaggaccaccaatcttcaatgcatgaaccacattgttcaagaatgaaggagaaagtataatatctgcaaattctctccctcgagcttcccttccataggcaccgttagtgtactcatctgaaacaaacaacttcttcaaattgcttttttgctcatacatcctatgcaaagtcaagaaagcggtagtaaattttgtctttgcagtttcaccaagcttctttgtttagtgaatctcttcatcatattcaataacaaaggcctttgaacaatagaggaatgcactctaattgcctgattaaagactgaattgatgggtctttccttgaaaatgtcaccgaaaatcaaattaatgcaatgtgctgcacacagagtccaataaatatgcgcgtacccaacagacatcaaatcaccagctttaacattttcactggcgttgtccatgacaacatgaacaacattttctgctccaatagagtctattgtactcttgaacaaggagtatattttggttgaatcagtcaaagagtcgcttgcattaacggactcaagaaacatacttcttttaggagaattcaccaagatattgatgatcatttttccatttctcgccgtccacttatccatcataatggaacaaccaaacttgttccattctactttgtgatcctccccgattttgttcaactctgccgcctcttttttttagatatagacctctaacttcatgataagttggaggcttcattcctggaccatattggcctacgacatcaataaaagcagaaaaagtgtcagtataattaacacaattaaaaggaagacctgcatcatacatccaccacgcaaacattgtgactgcacgaaccctcaaaatcgctttggcatcaatttgaggattaccactttttcctcccttatccccagatttttgcgggaagtaacaatccataggacctttggtcttgccagtagatccacagctagaagacattggttgcatccttccctgcttttgtgattttggtggaagcgacgaagcatcgtcaccttcttctgtttcatcatcgtcatcatcatgattatacagttcttgttcatgaatcatttgagtctttaactctttttttttttgaaggaatgctttcaattctgccttcacatgcgatggaactttaggacaatatgcgacatttggatcaccaccgattagatgcgctatttgaccgatagattcccccatttgaaatcttgtcacaaaaaagacatctaattgccatcttgttttgttggtctcgctaactctttcagagtaagtccaagccggatctttcctatcttcttttggtgccattaaaagaacaactacataacacataagaaagacaataagaactaagaataaaggatataaaaattagaggaagggcagtaattctcttttaaaaattgggcagagttaaaaaaaaaaaaactaggcagtaattctctgttaaaaattggcatcaattctgagaaagaaccgaaggttaaaaaaaaaaatttgccagcatttcgctgctttttggacgtttaaacagtgaaagaaaaagaaaagaagaagaagaaggaggaaaatcagaacatacctgttgctgttgaagacttgaacttgaagttgaagacttgaacttgaagttgaagttgaactcttgaagaagaagaagaaccccagtcgatgcttgtcgatgctttcagaagttgatgaagaagaagaagtcgactagtgtctctgctttaaaaccctagtcgcatttgttcgtttaatgaaagaccagacatcttgtttttaataaaatagggttgagtctgatttaaaacacagaagcgatcgcttctctcgcatcgcatcgctttcctgcttctcgttttttagtgggaagcggtcgcttttctacacctaagtcgcttcaccctgttgaagcgtgcactttcttgcttcgcttcgcttctcgcttaaagcgaggaagcggacgcttttttaaacactgattaaccatgaccattataattgtatacgggtaaaaccgagcccatgatgcacctcgatttccgacaagagaagccaggctcgagatgtgatggcaagggacaaatatcaagccgaaagtcccattgagccagagccctgggacacgatgcctgccctcgggaatatcgaggtcataattacagaatcggtcctaacctcgaacaacttcgaggaacattatcggacgatcaagcgtagccaacagaaagccgaaatatccatgaccggccgagtatcacgacggggatctcggcacgtatcgataaggaaccttcaaccagttaatcagaagaccttttaccttttacagagttgtacctaaagtaggactcccctactatataaagggggtttgataattcatgtaacacattgaaaacacgcgttccaaggaaatatattatcattttctcttttatctagcttttttcacttgttcatcagtgttgactatagcaagcccgggatcgagggtgaacaattttactaaggttgaatctgtcttattcgcatggtttgaattcattttatctttactagttcaatctaatccaatttatagctttgtgtcaaattaatccgcgtatccttaaaaccacttataaattcaattgttatccgattttgagggtaaacaataatgaaaggaaattgaacgatcagcttcactttggacacttcccatgatattggaccacgaactgaattagagaaattccaagccacactccctataagtgttttagaccatataagtgactgtcaacagcatactaagcctgaatcctttgagcaacaagctagagtggttgcttcatgtacacctccatggctaattctccatgcaagaaggcatttcagatatcctgtttataaagtgtacattaaaacattgacgctaaaaagttaaacagttgtgtgggtggataccatataagtagcgacgtccaaaaaacacttaccagaattagcatgagtttcagattcaaattcctgcggaggcaaaagacactaggtgatttctttttgtatgtccaagtcttggtgaacatatgtgagaaagaaagagtttgagagagaactcagcttgattattaccttaagcagtgggctttaaatagctaagtgcacatattctaagtattagatcaagtttgagacctagtaaacttccacaggaaaagggatagagtcagatacctaaacctagttatactctaaagtttttatgtaattagacctccttagtctctatcctaatggtatagtctcatctgtgctgtcccaaattaatatattgaagagaaattcaatcccaaagttgtgtgtgaatttatatggtatcagaagccatgtcgatatcttcctcctcctcccctccatcacctacactcgttaaccctctttcttcgtcatcttcctcgcatgcaccccttgaccatgctcatcacttcatttcagttaaattaacttctacgaaatttttcttttttggaagacgcaactattacattttcttcgaggacaaaatctccacaaaaactccacggctatattgatggaactaatccttgcccaccatcacacactacggttgaaggcaaagaaataccaaatacaacctatgtataatggatctaacaggaccaattgattcttagcctgttgatttcatcactttccaaagaaatgttgcccatgaaaattggtttaaatacctccaaagcagtttgtgatgcacttgaggcagccctatccgaaccttcaaatgcacgaatcctcaatcttcatatgcaactttaaaacttgaagcaagaagatctttcggttactcaatacttgcacaaggccaaactcatctccgacgagttggcagttgctgcaaggccccttcgtcttgccgatcaaaatgtgtacatctttaagggactgagatctgatttcaaggacattgttacaactctctcagaacgacatgaaccaatcacattctcagaacttcacagcctcttgcttaaccatcaatttagacatggttcctctatctcctcactttccttaaccaccccaaaaccacctgctcttcaacaatacccacagctaacttcaatcaacgaactacaaatctgatcgtaataatggtttcaattcaaataggggacgaggcagatcttcgtgtgaaagagggggtagaggtggttgttcatcctcaaggaatttctctaacaatggacaatcttggtctcaatatgatcagcgaacccggtgtcaaatatgcaatggtaccaaccatcttgcatcaacttgcttccagaggtacaatcacttgattaaccctatggcttatttgtctaaccaagctcctttaccctcaactttgcaatggtttgcggacattggagccactcgctacatcactttggatctcacaaatattcatcaagttgaagattataggggttcagatcaggtccaaattggctatagacatggcctttctatccatcgcactggtaactcctctctctgatcaccctcttggtctctctatcttaagaatatccttcatgttccttcaattaccaaacgtttactctttgttcaacttttgctcgtcacaataatgtcttcgaacttcatccctttcattttgttgtcaaggatctacaatccaggacacctctttttacagggcagagtgatggcgatttatacacacttccatccaagtcttcttcttcttccatctcccagccagttccagcctctccaacagcttctctatccatcaacacatcaccttcatgctgacatcttcatcttggtcacccccatcaactagtacttacgcagattcttaggacctactacaatctgaaatgaatgctttgctacgaaataatacctggtctttggttcctcataatctttcaatgaatgttttaggatgcaaatgggtgtttctcatttaaaaaaatttctattggggcaattaagagatgaaaagcccatcttgtggctaaaggttttcatcaacttgaaggccaggactactctaagactttcagtccagttgtaaggctgcaaccatttgcattgttctatttttagcagcttcacatgggcggtctctccaacaatttgatgtgcaaaatgcagttttacatggtgagcttcaagaccatgtgttcatgagccagccttcaggtttcatccatcctctttttcctcatcatgtttgtcaacgtaagaagtcactatacgagctcaaatggctcccaaggcatggtatatgcgtctccataagttcttgctcagcgtaggcttcatcacctctagatcggacacttccctgtttgtctgcaactcaaatggtgttgtcgcctacctcttagtatacgttgatgatacatagtcactggcagtggtacctcctttttagaatccattttcctcaaacttggagatgtcttttccatatgtaatcttggtcctctcagtttctttcttggtcttcaggtttcacgtgatcaccatggcatctctatgtcccaagctgaacacattaagactattcttgcaagagcacgtatgtagcactgcaaacctttaattactcccatggaagtgaatgtcaaacttcacaatggagaaagtcttagctttcatgatcctaccttgtactgtcatattgtgggccttacagtatgttactctcacttggccggacttagcttttgtggtgaataaagcttgtcaattcatgcacaatcctactatgagtcagtgggcagcagtcaagcgcatactctgctatttgatgcatacccaacgtatgtgttttcacattcctaggtctcttacactcacttttcaagccttcacacactcagattgggcaggttcactcgatgatcgtaagtccactacggttatgccattatcttgggtgaagctattctcatggtcgttcaaaaagcggcgcattgtagtagatcttccacaggttcagagtataaagctttagtagatgcagctgccgagctgacttggattctgtctctcttgtttgagcttggtgtttaacttcccaaagctccaattctatggtttgactacctatctttcggtaatcctgtgtttcatgcacgaaccaagcatgcggaaattaattttcaccttgttagacaaagtagctcgaaaggatctcacagttcaatttttatcctccaaagatcagcttggtgatgtcttcacaaagccactagcttcctctagatttgagttcctttggtcgaagctcaatgtggtttatccacctcagcttgcaagggagtattgtatcaactttgagtcctggtaaacttaggatatagtcgggtacctaaacctagttatactttgaagttcttatgtagttagatctccttagtccctatcctatagtatatactcatctctataaatgtacgaccgctgtaccaaattaatacattgaagagaaattcaatcacaaagttgtgtgtgaatttatactaaaaggaaagagaattaatcacaatgaaaatacaatcaagctatactctatttacaagatcctagaatattctagaatattgacaagattctaataagagttagcccgtatctgtgctggtgggaggtagcaggtatcctttagaattagtggaggtgtgcgcaagcgccagaacaccgtggttattaaaaaaaatccctacgaattattggtatgaataacaacaatctcctctatcatggaatgactccatattagatgtatcaataattttccaacgtcttttaaatgtggaaacactagaaaaagttgacacattgattaagaaagtaacaaaatgatacgggaagtacgaatatctttgcgtgaggtaatgaatggagttgttatgtctgttgaaggcatgattaggattagtgatggaggaggaggagaaagtcattgaatgctggcgatgtacttgtatcatgagaaaaatctcatctgtattagtaggaggatgtttatgaactgattagactcggacaggacaaacttgtgttttaagaagttagggactagtagatgtcaggagggaaattttatttcatagaatttggtgaaaagtatagagatgagtgggaggttacatttgctgggacgaactttactttttgggggattataaacatttgcaacttttcttgaaaatgggtgagtaaaaaaagacacaattctgattaggattgaggtctgtcttttccagtagtgtgatcatgaaggaagcaagtacatccaagcacttccaattgtagatggtggagattttgatctggaaattttagtgtggacagtaaagttgcaacatagaaaagattgatttgtacatttgccatcgataacaatgcttctagcaacatgattctagggtgaatgggtttgttggggctctatgagtcttcctcgagtggcggtgaggtctagaagtcgatgcaaagagaattgagtggtacagtcagtgactatgactcattctgtcagcctctgtaattttttgccgctatagcttttcagtaagtagtttcttccctggttttaatgtcatgaaaactagaaataaaagaatgaaaaatgatggaaaaacttgattatttcctcaagtttgattaagaacttaaactagttacaatgttggtaaaatacagaatatggtgaagtaattctcctaatgtgactcattcatagcaactgagttaacccaataaatgcaaatgactggacgatctcgacaaatccaagtctatcaatttcaacaagtttcgctgccttaatcatgacaatatatttaagtgatggtcattaaattggaaagagttgctgttgctcttgtttttgccatcattcagctgttcactgtggtagattatggtttcctaccaagtccaatgaaactgagcagtcttgacaatgcctgatgttcagtttctaaagtctgttctctctccaaaagtagaggaacataatgttatctgattggctcgggaaaaagttgtatgtagggtgaaaccttaatgacataatgaaacatgtaatggtctttgtgcctttggttcattatgtctgctactagatactgaaattgctgctgaaagtgctttttgaggtgtcactcattttttcttgctgctattaatacatagcgttctgattcttttcagacccagagggaaagtatgaggcacttgagaaatatggaaatgacttaactgaacttgccagacgtggaaaacttgacccggtgataggaagagatgatgaaatacggcgctgcatccaaatattaagtcggaggacaaagaataatcctgttattattggtgagcctggagtggggaaaactgcaattgccgaagggtatgatctctagccttttttggtctcacggggtgatgtatgaacatgtttttccttatatttatttgtctggatcctggttcagttgaaaacaatccaaaaacagtaatggaatagcagatctgtggaggacatttttattattacttgtctacaatgatattcttttggttggatatgctgttttaattagttttgttgaataatgctgcctggcaaaccaaacattgaactttaaaagagttatgtttctagaaaagatatgctcggaatagcatgattatccactcagagaggtttgtgatatttagcagactgtatgtggggtttacaggaaaaaatcattgctaatacatattgtttctggacaatacgttattcctgttaactatttgaattgtgagatgggtcagggtgtgttatgtggagttgttgaaaattagtaattgtaggatggaatgaaacaattataatcttttttgtttaccatggttccttgtgtttatttttaatgagcagtggcgtggtaatgaaatgtagttatagaacttcttactaaggggtctgcctatatgttgcagaatcaggatcgctgacaaggttcagtgaagagttctgatggatgcattcaacatttcttgaaaatatatatcaaaataatgctgttgttagtgaatcactgaatttgtgttaacttccctttgatttgaaactaccttacccgtaagcctgtaaaattgaggtggcttgcagagcctttgaatgatcaaatttctatttaataattaatataatgccaaaattgtggcagcttgtagagcctctgtgtgacctcgttttaactttttacataggtccaaggtagtgttagctgtaatatttgcgtgtacttaagagtcctgttcaagtggtggcatttttcacgtcatctactttatgcaatatgttatgtttccagccttcgtgaaatggggatgtgtttttgacagattaactgataaaagtcaatcagttctgtctcttgtaatgatctttttccagcaaaggaggctttttatttattacttgttaccagtacgttatgagatttagagcctttgtggtttggatatttaaaaagttaatcaatacttactttttattagatcagttgtgctagttgtaacttacttatcttacatatcggaataattagtttggtttaactgccagacgaatgtgtttctgcaccggaagtgaataattctaaattgatattggatagtgacttatttgagtgtatctgcaatatagtttttttttgcttagacgtagagaaagcatatgatgagttgggaaaaaatgtcgtttagtgggtgcttgagaacaaagaaatttctactcaaaatatataagtaccataaaagatatatatgaaggagtggtcacaagtgagggaccagtgggcggagatattgaggagttccttgtaaccgtgagtccataatagggagctgccccatagttgcttaccctggctatggaataagttattcagtagcaaataggacggcattatgggatatgctatttgtcgatgatattttgttatttgacgaggggcagggcaagaaagtaacaatcatacccgagagagtcaattgttaattgacgaaattagttaggagccgatcaaaagttggaattatggagaagcacgctagagaataaggattttacaataggtagaagttaaacagaagatatgcaatgcaagtttagcttttgaagtgaggttagataggatactagtgtcgagacaaaaaattcagatatctagactcgatctttcaatagaatgacatgatagatgaatatgtaacacaataatatgatggccgaattgaaggaagcccatggaaatgctttgcgataatgatatagctactaaagtagaacataaggtctatggaaactggtgatataaacagggttatataggagtaaaggctggaattttaagacccacaatatcggcaagattagcatcgtaaatatgtggtgtcagatggatgtactatacgacccaaaaatggttgagtccaagtcactacattgacaagatgagcatcgcaaatatgttgcgtcagatggatgtatacacaccaaaaatggttgtgtccatgtgaaggtgcatgtagcacacagtgatagtaaattgagagatggccacatttccatcatgtctttcctaggccttccaagtgcattggtttattggtgagactatgatgactaaagctgttgaaaaggtatgaactagatctaaaattacatgaagagaagtcatctagaatcacctacaatctcacagaatctgcgtggattcattatgaacatagcacaatgaaagcaaattatcaaaagcatgcaatagtaattagctagagttgaagcctagtcgctattgctcttacattaggttgtgtgttttccaggagcttttaatttggttagagatttgtatatcaaatgtgagatatagagaccctctagttttaacaaacacccttaagttatctcaaaagagagcaaaatagatagatgattcatataacgatcccaactaggttggatttgaggtattgattagaatgattgatatagttatccaaattttaaaaatcaaccttattagtaaggcaaagatgctcttaacatgttaaaaagaagtcgaacaagaaattgttcttcctttcctttgatataagatatttctctcccaccatcctggaaggagaaggtaaggattgtgagaatgcatgggagaaaaatctatctttttaaatatatgatacaacgagccctatatataatatatattctactcctactacatataggactaggacatattctactcccactgactggaatgatgcacacaacggctagaatagcctccagagagggtggagcagcaaccgaagaaaatgttggcgggttgggctgccggtagacagaagttattgagtctctactaagagaatagaggttttggtatcatgagaaaagaagagagtacttattgacttgattattgacacaatgagagtgttttttataaaggattcttattctagtgatataagcttaagtatttatattatgctaatgatatgaatagtgatttttctcttgtagttaagtaaagaatactccaaaatatcatataaaatattttacatattctcctattcagatacaatgagactaggcaatattaacctataattactttgattcttttggtattttaacacggtttttagtctttaaaagaaatcaggaaaaagagaggtgaaagatggtatcagccaaatctatatgacaattaacctcggaatgattatgctttctgctcctcatccatgcaggttagctcaaaggatagtccgcggtgatgttcctgaacctttgatgaatcggaaggttataacttctcttccttggtcttaatttgattgactttattttattgtgaaaaggtcaagtgattgtgcatatgcaagatcttggaagatggcctttgcgtagtgtgcattggattgctttctcttcaatttgaaaaagatagtatctgggaaaggcatgtcttgaagaaataaatcaatggttgaaaacctgctgcctttctcttgagaaccatgagccgtaacttgttgcttactgcaaatagttctgtttctcgtgttgcagtgattcatttgtatgacgccagtattattggatcataattttcttttcaagatatgagtctgctaaagacagttgatgcagtctttactcaaatgaacgaccgtggttaagtaacatattgttttaatcatttctgggagcaatttcagtcgagtttgatactaagtgagatatgcataacattgcactcaaatgtcaaactaaattttgatcatctaagctagtccgatgagttagtctcttttctgaaacccccaacccctcactcagcaaaggggtaggagaaaaggaaacgaaccacctcattctctaaaaagagtggaactaaattatgatgcctcctaaagtaaagtagttggacataagtttctgaagtttcaaatttgagagtgggattccgaggaaagccttctgtagcttgaaccttaattgtctactaggatttgttaatttcgacttttaagtgctaatactgtaatttgatttcctttttccttttcattttatttagttgatgtctctcgatatgggtgccttgcttgctggtgcaaagtaccgtggagattttgaggaaaggctgaaagctgttttaaaggaagtctcttcatccaatgggcagataatattgtttattgatgagatacacactgtagttggtgcaggtctggtactttttttttaatatccatttctccatgaaggaagaagtttatttctaccgactggttagaaaatttgccaaatgtattctttctctctaagatcaaatctctattatttatagagttcgatattaaagaaaagtgctgactcaaactgcttgtctgctttcaaatctcatggcgtgtggacagcaagtagtgactgctctttttgttggatgatttttatccttgcttaattcaatcttaaacaatccaaagttcatgatttaattcatttgatgtcactgggaaacacttgttcttcattctagtgaggttaaaaagcactattgcttcgtgattgtgttttaggtgatccatttttaaatttgagcctggagctgggaaatgcttgaactaaagtttacttttctgttaatttgagcctggaccttggaaatgattggaataggtttatttttctgttccataaagctgataaaacattactgatgatgtcctttatgtatgcaaccgagtaaaggagaaggtacctttacacccaagatatagtttctgtttgtagctggcttatattagtaactaattcagcgaatgttacttggtcaaattatgttgatacgttatattctaaaacttttgtttgtttataccttcctaatcattgtgtttgcttatgctttgtgtctaggagctactagtggggccatggatgcagggaatttgttgaaacccatgcttggtcggggtgaacttagatgtatcggagcaaccactttgaatgaatataggaagtacattgagaaggaccctgctctggagcgcagatttcaacaagtatattgtggccaaccatctgtggaagatgcaatttccatcctccgtggattgcgtgaacgatatgagctgcatcatggtgttaaaatatcagacagcgctcttgtatcagctgcagttcttgcagatcgatatatcactgagcgatttttgccggacaagggtaggctaatgtatccttagaactgcaagttgtctgaaatacttgcttttcattcctataaaattcttgtgaacgtttttcatgatatcttcaaataatacagcagcctaatgttacttttacataataagaaagttacagggttacaagtagcttatttttatggcttctttacatgttttattgcattgagtggatcaatgggtccagattttcaagcttcttctaaatgtttttagctgtgcgtgatctgacatacgttacttggggcttttcacttatgctcagttctttcttttcagccattgatcttgttgatgaagctgctgcaaaactaaaaatggaaattacttcaaagccaactgaattggatgagatagatagggcagtgctaaagttggaaatggagaaactctccctgaaaaatgacacggataaagcatctaaagaaagacttaacaagctagaaagtgatttgaagtcccttaaggcaaagcagaaagagttaaacgaacagtgggaacgcgagaaagatctgatgacacgtatacgttctataaaggaggaggtaaattgcatctttcattgatgaggtcaaatcaaagttgcagtttttctttgttttctcatgattactgttcaattttttccgttgcgtagattgacagggtgaacttagagatggaagctgctgaacgtgagtatgacttgaatcgtgctgctgaactcaagtatggcaccctaatctcccttcaacggcagctaggagaagcagagaaaaacctggcagactaccggaagtctgggagttcgttgcttcgtgaagaagtaacagatcttgatattactgaaattgttagcaagtggacgggtataccactatcaaaccttcagcagtctgagagggacaagcttgtctttctagagaatgaacttcacaaaagagttgttggtcaggatatggcagtaaaatctgtggctgatgcaatcaggcgatctcgggcaggcctgtccgatccaaatcggcccattgcaagcttcatgttcatgggtcccactggagttggcaaaactgaacttggaaaagctcttgctgcgtaccttttcaatactgaaaatgctctggtgcgtattgacatgagtgaatacatggaaaaacatgctgtttcacggttggttggtgcaccaccaggttatgttggatatgaagagggtgggcaactcactgaagtggtccgtcggaggccttactctgtggtcctttttgatgaaattgagaaagcgcatcatgatgtttttaacattctcttacagttgttggatgatggaagaataactgattctcaagggaggactgttagtttcacaaacactgttgtaataatgacatcaaacatcgggtcacattacattcttgagacgctgcaaaacactcgagatagccaggaggcagtttatgatgcgatgaaaaagcaggttattgaattggcaagacggactttccggcctgagttcatgaatcggattgatgaatacattgttttccaacctctggaccttaagcaagttagcagaattgttgagctccaggtaatacagatctgtaatctgttgaattctgattctcctgacttcatacgtttttcttctgtgttgttttctgtttgctgcggtgtcatctgctttctgattactttgactttaagagttttataagcactacagcagattactgtttgtgcgttatctctgtaaatttcagtttttctgtgtgagaacaaaaaaatgttttagtgtgcattagatctcaaaattacacataagtacatctcatttgcttggtggtcgtcgtcctagtttgtcctccttgctgctttctgatgagtgcatggttgagtatgtcaagcttgagaactgcagcgcactgcgcatcctgtctaatgtctgctcttgcagtagttttctaacagagtataatgtaaaatatatcatttcatctggtggttaagctttctccaagatgaaacataatttgatatctgttctttgtggttcttaatttggggaaagtgtttggctatttcttattttaaccttatcatcgcatctgcagccatagcataaccttggtgaggttcatgggaaagaaagttaccgaggctacctgacaatatcgttaactgatgaaaatatttgtagaacaaaactttgtgttttcattatcattactatattagttgctctcttttatctttttttcgtccatcttttctgtttgaagagatttttcttctgtttcatgagataattcgaggtggaactgctgagtgctatgtattacatgcggctgattatctatttcattttctataaaaccttctctctatcgtgagaaagcgaaggtctccctctgaagttatactgctgatattagagtttcttagaacctgacgactagttctctttttctcttcgcagatgagaagggtgaaagacagactcaaacagaagaaaattgatcttcattacacgcaggaagctatcagtctactggcaaatatgggcttcgaccctaactatggagctcgacccgttaaacgagtgattcagcagatggttgagaacgaagtagcaatgggtgttttaagaggagatttttcggaggaagacatgattatcgttgatgctgatgcttctcctcaggggaaggaccttcttcccgagaagagactgttgatacgaagaattgaaaatggttccaacatggatgccatggttgccaacgat

SEQ ID NO: 75 - DNA, 3476 bp, Nicotiana tabacum
gtgaatgtgaaatgtttctttgtttctttctttttttctttttcttgtatgtcacttttttttttgcaaggctggaactttgaaactttttgtttgaaaacacaatcattcgcagtaacaaacaagaaccaccgtccccatcttcactcccatcactcttcttttctttgttttcacacttcatatttactcttctttctcatcctttatatttacatagcaaaaacaacgtcaagatttgcaaaaacacagcaacccccccaaaaaatgtcaagatttacaatgctagtagttcttgttcttcttcttctatgtctatgccatttatcagtagcaacaataggaagtagtagtaataagaagagtacttacatagtacacgtggcaaaatcccaaatgccggagagttttgaaaaccataaacactggtatgattcatcactaaaatcagtttctgattcagcagaaatgttgtatgtttacaacaacgttgtacatggtttctcagcaagactgactgttcaagaagcagaatcacttgagagacaaagtgggattctgtctgttttgccggagatgaaatatgaacttcacacgacaagaacaccatcttttctgggtcttgatcgaagtgctgattttttcccagaatcaaatgctatgagtgatgtgattgttggggttcttgatactggagtttggccagaaagtaagagttttgatgatactggacttggacctgttcctgattcttggaaaggagagtgtgaatctggtaccaatttcagttcttcaaattgcaataggaaattaattggtgcaaggtaaaacttttctaaaagtttatgcggttagagacaagacatttttaagttagttaattatattatatctcaaattgtggtcgcgaggattcatattgcttacttcaacttttttgggactgggacgtagcagttgttattatatgttaaactcgtcctctcgcatgttggtctgattaattttatgatttctctagttggcagtgaaatttgaatctgggattttttgcttggtttgataccatgttgagttgtctgattagttgcataactaagtggtaactggtaaagctgctcccatatgatcggaaggtcacgggttcgaatcgtgaaaccagcctcttgctgaaatgcacggtaaggctgtatacaataaaccttttgtggtccggtccttacccggatactgctatggtatagcgggagcttagtgcacggggctcccttttggcatagctaagtgtgttgaagagggtttagttaaatcccattcatcagagttgtactgtacaaataagctaaaaatgaattatttttgtgtatgtaaattggtgtatcccattgataatacaggtttgtacttttttgaatttccttgttagaattattttaaaaaaaaataaaaaatatcatggctctgccactgttgtgctcaacttatctaaaagctaaaactattagagataagatatacttttaattacttaatcatattatgtctgttgataggtacttctcgaaaggttatgagaccactttgggtccagttgatgtatccaaagagtcgaaatctgcgagggacgatgacggacatggaacacacactgctactactgcagctggttcaattgttcagggcgctagtctctttggttatgcttctggaactgctcgtggaatggcaacacgcgctagagttgctgtgtacaaagtttgctggattggtggttgttttagttctgatatattagcagctatggacaaagcaattgatgataatgtgaatgtgctttctttgtcacttggtggtggcaattcagattattatagagatagcgtcgcaattggagcatttgctgctatggagaaagggattctagtctcttgctctgcaggtaattatgctagtcggaaaatatgaagaacttctagtacttcttaattattacattttattttatactagaccagactagtttaaaactgagcgacattaacaatgaagattcattcatattgccgattctaacttgcttgggattgagacgtaattgttgttgttgctctgcaggtaacgctggtcctggtccctatagtttgtccaatgtagcgccgtggataactactgtgggtgcaggaacattggaccgtgattttcctgcatatgtaagccttggcaatggtaagaatttctctggtgtttcactttacaaaggggatttgtcgctgagtaaaatgcttccgtttgtgtacgctggtaatgctagtaatactacaaatggaaatctttgcatgacgggtaccttgattcctgagaaggttaaagggaaaattgttctatgtgaccgcgggataaatcccagggtccaaaaaggttctgtggtaaaagaagctggtggggtcggtatggttttggctaacactgccgccaacggggatgagctggtggctgatgcccatttgcttccagcaacgacagttggtcagacgacaggggaagcaatcaagaaatacttaacctcggatcctaatccaaccgctacaattcttttcgagggaactaaggtggggatcaaaccatcaccagtggttgctgcatttagctccagaggaccaaactcaatcacgcaggaaattctcaaaccggacatcatagcaccaggtgttaacattctcgcagggtggacaggtggtgttggaccaacagggttggccgaggacacgagacgtgtcgggttcaacattatctcgggcacgtctatgtcttgcccgcacgtgagtggtttggctgctttgcttaaaggagcgcaccccgattggagtccagcggctattcgctcggctcttatgaccacggcttatacagtgtacaagaacggcggtgcactccaagatgtctcgacgggaaagccatccacaccatttgatcatggtgcaggacatgtagaccctgttgcagcactaaaccccggacttgtttacgacttgagggctgatgattatctgaatttcctctgtgccttgaactacacatcaatccagattaatagcattgctagaagaaactacaactgtgaaacaagtaagaaatacagtgtcactgatttgaattacccttcatttgctgttgtttttctagaacaaatgactgcaggcagtggaagcagttctagctccgttaaatatacacgaacgcttactaatgttggaccagcaggaacatacaaagttagtactgttttttcatcaagcaactcagtaaaagtctcggttgagcctgaaacattggtttttactcgtgtgaacgagcagaagtcatatactgtgactttcactgctccttcaactccatcaactacgaatgtgtttggtagaatcgagtggtcagatggcaagcatgtagttggtagtccagtggccattagttggata

SEQ ID NO: 76 - DNA, 25956 bp, Nicotiana tabacum
  misc_feature (3071)..(3071): n is a, c, g, or t
  misc_feature (3273)..(3273): n is a, c, g, or t
  misc_feature (4775)..(5163): n is a, c, g, or t
  misc_feature (5862)..(5862): n is a, c, g, or t
atgttgaaggctcttacatcctcatgtctgcagaatcgtttccacgccgtcacaacggcatttacccctcaagttcgccgtggcactgactcgaatacgcccttgcttcgggttttaggttcgctaagaagttcgaatcgcagggtcccttatttgtctcgacgattcttttgttcggattctactgatgggtccgaatcgaattccgaggctgctgcatccgaagccaagccggccgaggaaggtggagatgctgattctaaggcttcggctgctatggttcccactgtttttaagcctgaagattgccttacggttagttcaaaataattctttgcacccgcaccgatagatttagacgtgtctttaaaataaattgtatgacttttgttaactaatgtacattctcagttcaatttatcacttcatcattattaactaacataatttggtgcataattatgtattttcctgctccatcattatataagtacattttatgctaatatttgataactgctaaatgactccttaagaaaagatgttaactttttgttataacggtgtggccatgtctgcttgtgcaccaaaaaagaagatattaagtgagttccttctgttgttagtgctggttttatgtcttctttgggtagttttgatatgattttattcattattattcaaatttgtacatatggatgcaaacatgacgcagaattgggaacaatttgatatagaaattatttttaactttggttgcaacactctgttaagatttcggcaatcgaaagggatggttgtttaagaagttaactttctaggatataaaaaaggtggatcaccaagattatatttctcgtagattcgtacactcaatcattctttactaaaagaccttcccgaccttgacttgatataatgctgtgaaggtcaacattttatttttccaaagagaggcttttgataccctctttgtctctaaaagaatggttttattattagatgcttcgatcctcatattttgaacccagccattccgtttgagatgaaagaatagtattgtagacttttttaaaatcaggccgtagtattaaagaatctcgatatcaatcttcttaggatcctcagacacctcacatcgatgaccaacacttgtaatgttattgtagcttcaattagcattagtattttaatgaaatgagaattgacaaatttttataatctagtcgtctttttaaagatttcttgtcctgaatcttcttaggatcatcagagagcctcacatcagtgagcaactcttttaatgctattgtagcaatgtagcttcaattagcattaccctttcaatgaaaaaatgtggtatttcagtacccctccttcaaccacaatgttattgatttttgcttccttgatatctcctccactatttattctgcttttatatggctttttggtactatcccttcttgtctatattttcattaatgtggtgcttatgctttcctgagccgagggtctattggaaacaacctctctttcatcacaaggtaggggtaaggtctgcgtacacactaccctccccagactccacggggtgggataagactgggtatgttgttgttgttgatacttcctccactaaggcacaatccgccaactccttaatcaagtcttccattaggggtaattcatttgcaatcatctcttttgcttcacctaatgatttctaaaggtttcgatttttccaacaattctttcatctccatctccactcaagcatatacctctccattttcatcatctatgatcagctctaagtaatttcaagttttttcccaatcacacagcttggattttcggcaatgcacttgttcttgttcaaatgttaatgtgtgttatcttagtagtgttaaattagtctcattggaaagatatcataaaatttatgtatttctcacctacacatagatgtgtcttttctatttgattgttagattttctcagattgtatcacatacccttggtgatcttaataaggggcagcctatgctacccgattggtcaactttttcactattctttccgcttttggtgatctttaacctcatccctatttccgtagaccgtttgacagtatcatgcctctttctcagtcatctttttagctataaaattcctcctttttgaccattcttccagtgagtttctgccaccattccaaccatgtcccatttacagtgtaaaattactattttggccattcttccaatgagttttctaccatctttcaggccagtattatgattattgttccagatactattttggacgctattccattgctactccagtcactgtttagccgccaatttgagccacattagctgccaccttacgccacaccaatgatggtcttgatattcgtggtatcgcgttctctctggtcattgagaatcggttcccttttttttttgataaggtaaattgtattaatcaaaagggagaaaaaaaaaactcccgcatacaagaagtatacaaaaagtagagaatttacatcagaacatgattctctacaaatgacgcccaatcttctacgcaagtaggggctacatgtgtgcaccattaagcgatcaaagataaaagactattcttaagatgtgaaaacggagactcaatcccctcaaaaactctcttatttctctctccccagactaaccacatgaaagctaacgggacgaacttccacgccttttgcttgcttcttctacggaaattggcccagctatatagcatttcctttacagtgtttggcatcacccattgaacaccaaaaagattcaggattgccctccataaaccccaggacacaaggcaacgcatcataagatgatcaacttcttcccctgagcttttacacatgtagcaccaactaacatgtgtaattcctctctttcacagattttcagatgtcaagatcacttccctcgctgctagccatgcaaagaagcacaccttcgtgggcgccttaggaatccagatcgatgagtatgggaaagtagcttcctgtctcntgccgcatcccagagaaaatccctttgaagccgctccagtttttctgtgatgctcacaggtgcttgcaacagggataagtaataggtagggatacttgacaaagtgcttttaataagcacttccttaccgccttttgacaaataccgtttctgccagcctgctaatcgtttttcaaccctttcaatgactggattccaaacngaatttgttggaccatcaattccttctggtttgaaactctgaagacgtgggggaaagagaccctcagagtagcctctccacaccacctgtgattccaaaagctgattctccttccatcacccaccttgtaagtgatgttgccatagaaagcttcccagttcttcatgatgttcctccacatgccacacccgaacggtgttgtgattgccttggtcctccaaccccctcccgtggaatcatacttttctgctatgacctccctccatagagcatgctcttctaccccgaatctccacagccacttccccagcaaagctctgttgaataccctgagatcttttactccaagtccaccccacttctttggggaagtgactgtctgccaattcactagatgaaactttctagttccatctgccgcatcccagagaaaatccctttgaagtcgctccagtttttctgtgatgctcacaggtgcttgcaacagggataagtaataggtagggatacttgacaaagtgcttttaataagcacttccttaccgtcttttgacaaataccgtttctgccagcctgctaatcgtttttcaaccctttcaatgactggattccaaacagtagtatccttttgcaaagcacccaatggtagacccaggtaggtagtggggagagagcccatcttgcatccgagaacatgagacaaagcatcaatgttagcaacctcatccaccgggaaaatctcacacttgctgaggttgattttgagtcctgatactatctgaaatcactgcagtagctgcttcaggcaggtcaactgatccatatcggcatcacagaaaactagggtgtcatccgcaaaaagcaaatgagagacccttcgggcactgagcacctcgatcggagctgagaaacctctcaagaagcctccactcgctgcacgatccatcattttactcagagcatccatcactaaaatgaatagcatggggataaggggtcacctttcctaagccccctggagctgccaaagaaaccacacgagctaccattaaccaggacagagaatctgactgatgaaatgcaaaacttgatccatcccctccatctttccccaaaccccatccgtttcataatgaagtccaggaactcccaattgacatgatcaaagccttctcaaggtccaacttgcacagtaatccggattctctatttttccttttggagtctacaagttcatttgccaccagagcagcatccaggatctgcctaccttccacaaacgcattctgggaggacgaaacagacacgtcaagaaccttctttagtctgttagagagcactttagaaataatcttgtaaatgctccccactagactgataggcctatagtctctgatacaagatgcaccttctttcttaggcacaatggtaataaaagaagcattgatgcttctctcgaaagcaccattcacgtggaagtattcgatggcttccatcaactnnnnnnnnnnnnnnnnnnnnnnnnnnnnnnnnnnnnnnnnnnnnnnnnnnnnnnnnnnnnnnnnnnnnnnnnnnnnnnnnnnnnnnnnnnnnnnnnnnnnnnnnnnnnnnnnnnnnnnnnnnnnnnnnnnnnnnnnnnnnnnnnnnnnnnnnnnnnnnnnnnnnnnnnnnnnnnnnnnnnnnnnnnnnnnnnnnnnnnnnnnnnnnnnnnnnnnnnnnnnnnnnnnnnnnnnnnnnnnnnnnnnnnnnnnnnnnnnnnnnnnnnnnnnnnnnnnnnnnnnnnnnnnnnnnnnnnnnnnnnnnnnnnnnnnnnnnnnnnnnnnnnnnnnnnnnnnnnnnnnnnnnnnnnnnnnnnnnnnnnnnnnnnnnnnnnnnnnnnnnnnnnnnnnnagcatcgtgcacctcctcctcctcgaaagctctttctagccactcattgtctccctcccctatgtggttgaactctattccccccaaagtaggcctccaactaacttcctctttatataagttctcataaaaccccactatcgtcccgtttacctcctcctcaccctcgatcctcaccccatctacaactaaggactctatgaagtttctccttcgatttgcaatcgcaaccctgtgaaaaaacttagtattcgaatccccctcctttaaccagagcgcccttgatttttgtcgccaactagtctcctgagctattgctagctcgactatttcactcttaacctccctcaatctcactttctcagattcatctagctctctcgccccttccccgctctctaattcccccaattcatgcataagctccctcattttgaccttcaccctcccgaagacctccttgttccacctaataatatctcccttgagcaatttgagtttcttcaacagacggaatgagggtgaccctgataccccgtagttggtccaccattctttcactttgtcacaaaatcctggcactttcaaccacatgttctcgaaccggaagggagcacggacccccctccctctgcatccatctagcaagataggcaagtgatccgaagtcagcctaggtaaagggatctgcaacacatnttgcaacacattcggtaccagctcatcccaggaggacgatatcaaaaatctatcgagtctggaccttgagtttgaatcctccgccctggtccaagtaaacctttcccctgacagaggaagatcaatgaaaaagtgatcattgatgaagtcagaaaactcctccatggccgtcgaaatcaaattgcaccctaatctctcctccgggaatctaattgtgttaaagtctccccctagaacccatggaatgtcccattcccccataatattagcaagttcctcccagaaagacactttggactcttcccctaccggcccatacactcccccaaatctccactccaccccactcactctatctttgacgagagctgccaaagagaaagctcccttcctaatctcctttacctccaaacttctatcatcccacataagtagaatacccctggcacttcctgctgcagggacccagtcatatttcacccaacaaccccccagacacttctcacgatcgcatccgacaaaacttccattttggtctcttgaaaacaaactaggttggcaccccactccttaactcccactttgatgatggcccttttgtttgggtcattcatccccctgacattccatgaaaggatcttaacttccataagcaacaatagcccccttttccccacccccctagacgagatccctttctccatgtcacacactcgaccccttctctgatacaccactacatcccctattttattttgattaacacctttacccaactccctccccgcgccttcgtaacaaggctgttgctcaatctccctcaacagttctagcaccctatcttccttcccttcaaaagaaacacctaagaacttcccaaagtttaatagtttatcctccatccataaggacatgtccacttctccaatccgtgacgaaattggacatgcgtcttctgtaattaccttttccttgcccctaccggaggaatgcaagaccatagcattgctagtagtaggaactctgggtgtcgggtggatcacgtcgtttcgttgagaggcaccaacctcaggaattaatgcctctcttggaggagattgtattgtaacctcagcacatctaagcacagtgggagatgagggggcgatggagctgggtccatcagaggcggggggccgtggaataacaccgctagcttttgccggtgctgcccctggaacagtggctgaagaggagcacaagtctctagtgtttggtatagcactgtttgaggcatcattggcagaaggaggaggagtgacttgctcccatatgtttaggcgccttatcggacgtcgcttgatataatttgggcccttttggatcgattctaatagaattgggaaaagttgctgggcccatgtgtagaggcccagacctatgcttgctgaaatcttgcccgaccctatgatagttaagagaggacgcatcactatcccattcacgtcttttcctcctgttaaaattttgtcttcttctcccaagttcaaacctcccgtcacttctcgatctaccgtctgattccagcttagtccactggtccggtgagccctcccctcctctcagaaactggtttccccttccctcccttctatttgacctttccttttcttccgccaaaatcgcaggcataaagacagggcgaaattcagggctcaaccaaaccctgtagctcaagtagccatcttccacaacagtggagacagggattcggccccctttcctcaccacaatccttactcgcgagagatcgtgcaagctgcaagtgacatcaatgaaacccccacagatttccccaaccttcttgaataggtcaagacaccagagatgcaccgggagacccaccatgttgaccaccaatgtttcggcagggaaacgagggtcgagacacccatcgtgctccacccatctgtctaactttaagaaattcccatcaaaccacctgtttcctcttacgagaatttctgaagcttgagactcggtgacaaatcgaaagagatattgcgtgtcacccagtttcgatattttcagcccgtccttgacgttccatgcctctgctgtccagttcctaacagtttctggagaaccaacccatttggagaaagacccaatcaaacaagagttcaagaaacctttacgcctgagagtgtgctcctcggacagcgagaagtgtggctcctgccctacgtcaagctttcgctggcatcttcccccaagttcgcgggctggccaagatgcagctttgctaaaagacatgctttctaattttctagattctagggagaagtaggagcttctctctgtagagtccgtcatagctaaaccaagagcctcgcaaggagactgactgaagaagggaaagtgagagggagtgaaatctggccggaaaaagacacctccgtcgccgaaaaatagcaaaagtggtcggaagttggaggttgatggatgggtgaggtcggaatagcctcgcgaagaggctgtctgaaggaaaaaagttgggatctggcctgaaaaggcgtcacgtgccggcgcgtggggtgtcagatcccggcgattctttctggggtagtgtcgcgacagggttggctctcggatggtggtggtggaatcctaggattcatggttcatggtggtggtgaaggggtgggatggggtgtctgtgtgctacagtggtttttttccgcttcatgcacattgagttctggtgactgatctcgttttgaactgttcactttctaggtgacgctttactattacgactattgttcactattccgtgttttccagaaaaagcaaactcaaggtgttcttcacttcttcttaccttgagttcaaggacacataatacaatggtaatgttagttagtagaatgttagtgttaagttagtccaacatcaaagattattgtgcttttcacacctgaaaattaagtgtcatgtattatgtaataagtattcatcaacttatcttttcatctgcttcttctattgtctcacaattttcagattaaaatggagtattttttttacaaagaatcccattagcaagaagattgtgattgtgtcttgggcacattgtcagttgaaccatccgtattggttgagattgtttctttgaaatctcctgatattagaaacccgtcgatccttgagtacttcctgccttgtttctctctggaccatatgtaactcctaccttgcagaggcaaattgatcaactctatgtcaagactgaagcttcagaaagttcctaatgattttgaatgatttctcacctgcaagaagctggtgattcacattgttcagcaaaagattttttttttgtttgcttgtcaaattaacattgtaattagaatactctccttcccatatgctcttctcaaagtcagcattcaaccagttatgcctcttacttctggccgtacagaaggcaccttgatggatgttaacttttaacacttcatcctatatttggaggcctagagagggttacttcatgctttagtttcaatttaatcaacagcttctaggttatttaagaagtaaagcattggaaaatacatgcgcggtttaagtaataggattgccctagtatctcatttttctttgaaaagaagtttgattcatatgtgtatttcagtttttgctagttgttgcaggatcagtgtaaaaatggtatttatcagccttccctaaaaaaagagagatactgaacgaatgcaaagaaaacactgtttcttggaggcttcttatttgctcataattcatctgtttgtaagatttatgggtgcgacccatttcttgccttcttggttggttatagttttatctttggataagatttacctgtaagacttgcaattaagggctttatgtcatttatcatgctaaaaataacataaagtctgtgtgggctgtacttttttaattctatataatttataatgatgcatgttgttttcttggtgcaggttctagcactgccacttccacacagaccgttatttccagggttttatatgcatatctatgtgaaggtatggtaccttgtctagaatgggttaaactatgtcttagttagtcttcgtgatttttgaaatagaatagatataagctttaaacattaagagtaaaattactgtcaactttctgagagttgatactgtttcagctagtgttttggagcctatttcctcttaagtctataaaaccagcattcagctttaacaatgctactttaattgatggaaagttcttggctgaagttgtaagcttgaaaagctaaaaccttcaattaggagagcgtctgttgctcaattgtaatattctttagcctcatttggtagtttccagaaaaatataaattctgctgtaatggcatgcaacaaattgatctgaggctccacataatccataaatttcactgcaggatcccaaggtattagcagccttgctggaaagtcgaaaaaggcaagcaccttatgctggcgctttccttatgaaagatgagcaagggactgatcctaatgttgtgtctgcctcagatacagaaaaaaacatctatgagcttaaaggaaaagacatgttgaaccgtcttcatgaagttggtacacttgctcaggtacatcttgttgttccttgtgttattctgttgctttaactttattgaagaagtttctgatcaaggttgatgcaacttatgatgagccagataacaagtattaaagacgaccaggttattcttattggtcacaggcggatacgtatggcagaggtggtaagtagttgtctgctttattttttggttataagcagctccatatgttttctttttgtcctatttagttctatttttcatctacatatccatcatctcctgattttgagactgcccaattgacatcttgggttcattgcacttgtatatttttctctctttcctaccttttgtgtcccaacaccgagtccttcccctttggcttcatataactgagcagctgcattgtcaagcgatagaggtctattgcaatttgaggctaaatgagctgttttccccagttggttatgacgtgttatcaatagaatgaaaccctcttttagttattcttgattgcttgtttgcaagagaaagtagcactgattttgtaataatttttggacaactggtttcctgcaaagtcataggaatgtctttcttattgcacttcggggttgtagaagagaaaagcaattgagtttcttctatgatgtgctagttttgcatctgtttgattgctgatgcatttggtttgaatgaaatcctagacttttgataacctagaaatctgagggtaagtggctcacggtttgaaactcagtggataatgggctcaccattctaccattgtccacctaaatactaggcttttgtttgcgccacggcacgaactgtgatgtgcacccaacctacatatcacgggctgtactcttaccactagacaaaagccccggaggcttaaacatatattaaaacacataaaagtttgaatagaatcctatatatttgggctgtaatttggtatagagtcgtattcttggctttagctgtaaagctggagtactcatgcatggtcagccattaatgggcttacttagccactggagggtcttatgtcttcttattttttcgttttattttgtgattgaggacctcttatcctcttctattggacttaaatctctcatcccctgagctcctcagtaataattctcctattatactatacttactgttggatgtttacctctctaccttcacatggtagggtaaggtctgcgtacacagtacctttcttggaccccacctgcacgattacactgggtttgtttgttgttggatgtttgcagtcagatttccttatgtagtcatttcttttgtttcaataaacaatttcttcaatatactagtgtaacaatttgatgactatgcagtagatttgtcacacttgaatgttcactatcagatttccttactttattcaccatgttgttctttttccgtctcaataacccattttgtgaaatgtacaagagtaacaccttgaggactgaaacagtgacattcatttgcaggtcagtgaggaaccccttacagtgaaagttgatcatctcaaggcatgcctcagtttcttgtgcattctttctacccagcaatgataaactcataaagcttgatgttcagttttgaaattgtttctaaaatttgctttcttaattatgttgcaggaacagccgtacaacaaggatgacgatgttataaaggcgacatcttttgaagttctatcaaccctaagggatgttttgaagacaagttctctctggaaggatcacgttcaaacttatatccaggtgttagtcatttctttctaaatgttaagtcctaattgtttgatttggtgataactccaaaaaaaaaaaatttactctctcaaaatgcattgccttttgatattctagcccacactattgtgtgaagctccacaatgccggtggattgtgttaaacttagatcatgccctaagttaggcatttcatgccattctttttaatggaaaattatgttcgtgttggtggtaatcaaatccatgactagattctctgccttatagttgatgccctgctgaaagaggagactaattaaagatgtcaagactgctaggaaatggaaggtcataaatgttctctgaaccaactgtatacatattgttatacatatttctaaagagacgctaggaagtttatacaactgaacaactgtataagatgtatttggagctaggaagtttatacaatacctaattctctctctgctgaatttctaaaaagatgctactgattgttatgaatagtgtcaaaatcaaaagataatattgtggcatgttttgctgaagaagtgggagtggagggataaagggatagggacttactgaatacttctaagggaagcatttgtgtccctccaagttattggtacactagtaattggagtaagagacattactcctttcgaccaatttcagaggggttatcaagtcttcaaagcgtggcgatatttgtgggggttggctggaaattgaaaaaaagacaactctaagaaatcatcctagatgggcttcgatcaaggagaggaggcagatggagaagatttcgaaaaccctagaagtggagaagaagggttttctttataaattacatgtttggagtgtagcgttggtaacaattatctccaatcgacgaaatggagaagaagatggacctgctaggtactatgatgaagtttgagataggcctgctaccgtagaaaagatcggtcatgtgggggttgggaacaatatttcaaattctaaaaaagtgtggacagatgtgggagtggcacgtggaaaggtcttaaggtagaatgggtcagtagtaaaggaaagggctccagaattgggccacttatgtcatgatgtttggaagcttaacataacttttgggtcataaaaaataatagatataggctcagatgagtcaacctttattttcaataaggggcttggtcttttagccatgaacctttagggtctcagttttgatactcttttagtggagattaatgtcattaatttgtctgaaacatgatacattttagactcctttcacaacaccatgatcggcaaaccgatgaaagagcaggaaagccctagtctgccacaaatttcacagaactcacatgcagctgattacacaaaaattgtcattcaagattaagaaaactctttcttcgtacaatcgaaagaggctgaccaaaatcagatagttttttgaatttgaaagaactaaaccatggcttatcgaagaggctactcaagctttcttatggctgcataataatgttacaaagatgagcaaacaatatggattgaatttttgtgaatgtgagattgagggtctagctctgttcacgaagcttgacaggagaaggcataagagaaatgaagctaccatgtccagattcacaattccaaaagtgataggtataaaggagctccaaaaactgttttttaatgtgaattatggggagctcggatcaatgatgggaagggggatcacaaacactaggtacccatgaagctgaatattctcacttggaatattagggggttgaatgacagggaaaagataaaggtgataaaaagttaatccataaattgaaggcaaatatttattgctttcaaagacgaacttagaagggggtgtggaaatactagttaaacaaatgtggtcagacccatctcaagtgttgtttggagtccaacgacaggaaagggaaaatattggtgatgtgggaaaagaatgtttggacaagagaaactatcaacaagggatgtatactatcactcgcaaaatttcctcattatcacagaatttctcctggcacctcacaggggtgtatgaatcacactgcaagttggagaaacaagaacgctggtgggagatagtagcatctaaggcatttgtgcagggccttgggtggtgtatagagattttaacactaatagattcatagcaaaaagaaagaacaacaataaactcactagggctatgatggacttctctaattttatagatcattagaagcttgtagattctaatcttaatggggctccttttacttggacaaagggtaataatcaggaaaactcttcaagattggatagatttttttcccggctaaatgggctgaggaattaaagaacaaaaggcaagcagtactccccagtgtattttctgattgtactcccgtttcttttcaatgcggagatggggaagtttaaaatcttacttcaagtttgaaagctggtggttgggtgttgagagattcaatgaaatggtgaaaagctgtggaactcttttgaagtacagggtagactagactccattctttcaagctaactgaagttgttgaatacaaagcagtgggattgggaatcttcagactatgacagtgttgtgaagagcctgaagcgaggaaaagcgataagccccttttcgcttaaagcgagaagcgagaagcgaagcgctcgcttttttgaagtgaagcggtttaaaaagatattaaaataaataatgcatagacaacacatgtaactgtaagcaaatgttcaatacttcaatgtaaaaactaaagagtagcatcaattaaagcacaaaatgagcatcatattcttcttcaagattgtcaaattcttgtattccactatcattattatattgctcgtcatcttcttcaacttcttcttctacatcaactagaaatgaagtaactgcttcttttcccttcctctgtgagcttgaaattgaggtactccccctcaaaccataaattttctccccaattccacgcgcctccgcaacatcaccccaagtgaaatcagaagtttcctcaaatacttcttcatttgcatgatcttccgggactccaattagccattcattagcatcatcgatgttgtccaaactaattggatcaattacattgcgagcattgtaacgacgcctcattgttctattgtacttaatgaagactagatcattgagacgcttcaaggttagtttgttcctctttttggtatgaatttgcaaataataagtaattagtaagattgcatgcgcataactgtctgtcatcattcaacattctaacttcttgaagttgcagcatattggtgatttcaattatgcaaggttagcagattttggagcagcaatatctggagccaacaagctacaatgccagcaagtgcttgaagagctagatgtaagtccgtggttcaagaagttagatattccctctgtttcaatttagatgacacactttccttcttaatccgttccaaaaagaatgacacatttctacaattgaaaataattcaactttaaacttttcattttacccatttacccttagtgagaagtttttataaccacacaaatgttatgcccccacaaagcttttaccccttaagcttttaagtccacaagtttcagaagtcttttttcctcttaaacttcctgccaagtcaaactacctcatctaaatttaaacggagggagtacataatattttctgtatgtgtgcctttttcaatccaaacctcaaagagagaggtttaccagtattgtgagttctaaccactctggaagagagcgaggttttattactaggaggtagatctaagaatttttccttgccatttgcttcctattgtaacaaaaaaaaaatatatgtttggtcagtgcttccctgctctgaaaaggaaaatggttgaaagttaaaaaaaaggaggatcaaagcgtattagcggtaaagcttcatttcttgctgatgggtaaaatggcttctcattggtactcttgctcgaaaaattaggaatctaaaaaagttatcagtttgttcaccacttcataaaaagaaattgtcagtttgttcaagtggagctacttattttgggaaaattagaaagggaaatattcagtttagaacagctagcaatattttgtatttcctcgtaagaatcataaacttgcattacaatggttatttcatgattttcatcgaactgagccttttgtctgctcagggatcagaatatagtgtgtgcatgagataaaatgaatgtttcccgcttgtttcatagctaacaccataatacctgcatcaggtgcataagcggctacagcttaccctggagctagtgaagaaagaaatggagattagtaagattcaggtaaatgcacatcaagacgcatacctgaactttaaataggtgctatgcatgcatttagcattttacgtcttttctgttgtctgcaggaatcaatagcaagagcaattgaagaaaaaataagtggagagcaacgccgttatttgttgaatgaacaattaaaggccataaagaaggcatgtggattatgtgcagctttttttgtgttatcatccttaaacttagtacttacatatgtttattcctagataatatatatgttaagcttctgattcttatgtttgattcacagtttaaacaaagagttgatttgaaaaaaaagtgcttccttatgacgtgattttgattggcttaatgcaggaactaggtttggagactgatgacaagacagctctttctggttcgttgtctcttaattactactgaaatgaataatgttctttttggatttattacggccagacgtgttttcccatctggccaatgaaacatcttatgttggccctggaaaaattccatgtagcagtagcatagaaaaggccatttgcaatacgttttgccctttctgttgtaacagttttatggtggctgattgatctcctgtttaccattgaaaatcttcactagaagcatgaatagcattcaggcgataattggctttacagataggaaattgaaggttgaattttctttgtacacggtccaaccaactttattgacatgctttctaaagctatttgagacataccaaacttttgacagataagaatacattgtacctatagggggctctttgtgttttcactaaagcacttaataagacaatactggaatccttcaacttcaatttccgaaaggttactgtctaccatatttggtaatgtggcactaaatcaacatggatttactggaaggccacattgttagcactgcattgttgtttattcaagttatggactgctcatgattcagatttatcttcctcctccaatgtttctttttctcttgaactctgtcctgtttcccttttcaatgcacttccttattagaagcctacttgctttttctgtcatgtactctttcttctcccctttgctcctgttgaggagtgtaatgcttatgaaggtgcttcttccaggttttggtgataatagacattactgcaaaccctaaaacgcggttctcattgttttttctctataattttcacaaaaatagagttaagctgcgtgttgtaacattgttttggtagacctggttttggtgttgaaattgagaagaaactgcctaattattaggtttgctttaagggcttcgatttttctggtcaatactaacgaaaacctgcagttttttgttcccttttttattacatctaatggtgtgacactatatttgtttattactgcagcaaagttcagggaaagattggagcctaataaagaaaaaataccagtacatgttatgcaagttattgaagaagaactgacaaaactgcaactgttggaagctagttccagtgaatttaacgtaacacgtaattatcttgattggttgactgccttgccatggggtaattacaggtttgttgtctatcgattctgccttacattgtcttgggttcaacccaactgatgttatccttatccttggctagctgtactagaggaatctgtttgagaagctggctaaacagtccagcgagaaataaaaatgttattctctgaaatttgctgcttccaagttaaccttactgcctagtgatgtgacttgcctaaatatctatcgagtaatatccatttgtctttaacttttctttctcctccagttccttattttgggttcttacatgtcatgcttctggctttgaggatgcttacttgacatcccaatgtatgagtttagaccaggatctcatgagagcagcaaaactaggattgtacttatgatgagctccttaagatgggggcttgatttgccgtagttcgtgttgtttgctgctgatggtggtggtgttggctttatagttttgttctctgccatgggtgtattgcattggttcctgaagttttctttttatgatccaaatgcagtgatgaaaactttgatgtactacgggcagaacaaattcttgatgaagaccactatgggttaaccgatgttaaggaaaggatcttggaatttatagctgtgggaaaactcagaggaacctcgcaaggttggtaaatgcctttttttaaaaataataaccctcatttttattaaaaaaaatcctattttataaggttcagccataatcatattaaaagaacggaaaatgatccagccatctccttactgtccattgtcataacattataatggaccaatggaaaatatatccatagaacatgagatttatggttcccaaatactttattgacatcaaattgaaacgagtaaacggaaagaagtgaacattttagggaatttgagaaatatttattggtcaaacttaggtaatactttttgtgtcagtctagagttcctccaatgttttcttgtgattatctgtggagtaaagaaatatatcttgagcttaatttcttcccttgaaaagcaactaatgtgaattaaactgctgcaccttgggccatagtttgttggtgttcttcttacattctgattttgtgctgtccatgattgggcactcgctgtgtggtattcgattgataacttactttcaccaccagttgtacttgtatatctttgggacattgaacttgagatgtagttgtttgttgaggataatctttggaaactatgaagtgttgagaaaaaaacaggttgaatgaaagttaacaatataatccaaagacaaaggttaactctagaaaaatgtgaattgcatcatagctaggacaatattaggttcaaatgataatattaatcccaattatacactggcactgtctttcatatgtgcggcttcacctgatttatctcagtttaattttgaatctgagtcaggaactagaaacagactcattgcttatttttgtttgaacagggaaaatcatatgcctctctggccctcctggggtgggcaaaaccagtataggtcgttcaattgcacgtgcattgaaccgcaaattttaccgattttctgttggagggctgtctgatgttgctgaaataaaggtaatgggaatatctggccagctaaaacagagttgttttgtggcgcacagaatcttgaactttcatgactaactttgggatacacttcaagggacatcgacgaacttatatcggtgccatgccggggaagatggtgcaatgtttaaaaagtgtgggaaccgctaatcctcttgttttgatagacgaaattgacaaggtattttatggtttgtgagttcatgcttcaattgtatggctttgactatgagaggaagtctaacttctttttcaccatttaatctcgtttttctgtatatgaccactggaagaatcttgagcctgaacatattatgtttttgcttggatttcctctgcaatctaaatgtttgaagaaagtgtttatcgatcagtttaataatagccttgtattttttcttctatggcagttgggaagaggacatgctggtgatccagcaagtgctatgttggagcttcttgatccagaacagaatgcaaatttcttggatcattatcttgatgttcctattgacttatcaaaggtagttgttttctggagcacttatcaaattattgtggctgttgattggcccttatgaaatgccctctaacatcatttgatgaatggggactaatgtgatattaaaaatcttgcaaatatctactatcattttgctttttcaccttttgatttccccccctttttctttactgattgatgttctctttcgtctcttaccttagttaagtttggaaaaggtttcgtgactgagcctgtttcttttattgtccataatggaaggttatctggaagtattttatttcacgtctgtgttacctttgtctctgtcattatgactgtaatatgattagtgtaagtagaatgttgttctcttgatacttgagaaaaaactaggtttcattggcattggttttggtgatcattcaataggaaaaaggttgatgcattgagttttcctactgtctgttcatattatctttgatggctttactgatgagggatatggttttatacctcttggagttaccgataattggagcgatagactttgagtgttgagtgttagtttacctattgattaaagaatttggcccataattcaaatatgacagttatcgatactatttcattttattatatcaaacttcagcaaatcaacatggctacagagagaaggttgatgggtatattcgcatacaatttcatttattttgtcctttaatgtgataatttactgtgtgttcctatgtcttttcataatggtaaatatttgtgttatatttccaaagggctttgtcaaaagaagatagcatctttcgattattttggtagtattttgggtctgacttggttatggggagggaggctatatcaaagccctgttatggatgttgagttatatatgaacctgaagaaattataaaatccaacctctaggttttaatgtacttctaaaatttgaaaaaatcgagctttggcaccttcagtgttttctatcctctttgcttaatacagttacctattccactgtagtttatacgagaatgacatctgcacatttatcaattttttgagtgcataatttgaggtcgatcattttcctttttgcggctgcaggttttgtttgtctgcacagccaatgttgtagaaatgatacctaatcctcttttggatagaatggaagtaatttcaattgctggttacattacggatgagaaaatgcacatagccagggattatttggagaaagctactcgtgaaacatgtgggatcaagcctgagcaggtatgtcttatagaaacatctctagttgcatctctttcattatctcctgtgcatattcattatcgggtgaatagttttgtattttttccgctcccaatttttgacattcagaagcagacattggtctgtcgggaaaatgttcgaaacatgattgggcaagaatgtaacttcttaaagtaaaatgtgaaaagctttattcagttagaagtttatggaataaaacatatgattggaacattcaggggatcaagctctttacacccttccatatagaacatggctaaaggaaaaaatcgcagtaaatctcattataggttttttgccatatgctttaatatttcctagaaaatatactgtttgatgtattgatatcattttcatcttaagcctctacatttagaatatacttgcctccaaagctaatggattataaagtttaatacaaactcttccatcactatccttttcaagaagtatttaagtggttcacataaacaactgaacgagtccacattgctgtatatatcctctcaagtgctgctttctctttgaggaatgtttgcttgaccgagccaaactgtgactgcctatgctagccaatgtgctcgtgcatcattaacacaaccactgtgccacactttgctgggagtataaacgcaattgaaggtggttctgtcgtggtagtcgccaatctctattagtaaatggaggtataatgagtttcttagtggtagggatacatgtgcctggtgggtggggttgctggatggtattgtctaacagatttgagcggggcgtgaactaaagcaggatggatgtttaaaatatgccaagtgttttggtgtttttgctgttgacttcaatttgaccatcgtgtaaaagagaaactagactagtttgttacacagtagtgaattttttattactgtacaaggaatcatcatacgatgccaagattgtggtgatgactccaaaaaacacttgacaatgtctattgagtgagcttaagttataatatgtctgcagtaaacatgttctcccacagccttaaagatgagatccgtggaattcggagaaccttatatttagctctctaatgtgatcttcagttgagttacatgccatatggatctctggtgaagaaaagggagctgaagacttactgattaagggcatcaaaatgacatttgacctcatctaactctgtggtgtcatgtggtgtcatttactgtgcatatatactctaataattaacgttttccacttttccgggaaaaaacaccctaaatatgggtgtcagaagttaataagttgatatgtgggagggctgatggctactttggtttgttttggccctccatagcggataggagcagttctaatttttgaagtatcttgtaggctgttggtactttttcatgacatagtagtggcgttatgcttatctaatggcaaatgtatgacaggacgagggtagagctttgggtaccatttctcgggaaatgttaactccctaatgctcctgtaaaattactcgagttgatatgtaatcaagttgaagagatgcaacgtttgagcccatgtatatgtcatctctctgtctctcaggcttttaacatgctgagggccgtttctcagatgcagagatgtgatatcaagccggaaaattaagtgtgcatgatttatgttagcaattgattgcaattcaaagccttgaatggttgatgtttggtttaaatatttcaacacgtataaccatcctggcagttagtatatgtggttataggaagactttcaattgatgccttgatgttgtttttctaaatatttcacaagttacactgaagcgttacttgcaataagctaattttattggcttcatgaattctttatttcaggttgaagtgaccaattcagctcttcttgctttaatagaaaattactgcagagaagctggtgtacgcaatctgcagaagcagattgaaaagatttatcgcaaggttctgtgacctgtcctcttttgtataatacatctatgatgaaattgtctcgagtctcgtacctagtcaacttttgatgaaaactgatggttatttcatgaaatccaatacgaacactttgaatcgttttcatgctctgatactttgcacatcctgttcttgcttttcagatagctctaaagcttgtcagggaagatggagagattgagcctcagaatgcagaggtaggtgaggtagaagcagaatctatccatctatcagacgaaatcaagtctaaggaagaaattcaagctggagctgagtccgcaaacggtagcaatgatgacaaggcctctgaaaataatgctgaagctgaagcacagggagcaccagtgaatcaaacacagaaatctgctaatgaagatgcttgtttacaggtaaatgaaaaacattaaaaagcaaaattataatgtttagtacttcaggtgattcttgccagttgtaactatgtatgctacaatgtattttaatgcttctaagttttatctatgctcaaaataaaaatacaagatgcagtgtaataggtagttttgtaggcacagaagtgtctttttacaacttgtcttactgtcacatgttggattaaatatggttaacaaatgaatgtaagaaatcatttatctggcaatataacaccaaacaagcaggggaagcactttcttttgaaatgttaactaagaacaagcaagggaagcgcttggtattcattttctacgctaagtcccccctgtatcttaaaaaggtatctatgcataatttgcatttatatcagactgtaagacaagagtgggttgctctagtggtgagcaccctccacttccaaccaagaggttgtgagttcgagtcaccccaagagcaaggtggtgagttcttggagggagggagccgagggtctatcggatacaacctctctacctcagggtaggggtaaggtctgcgtacacactaccctccccagaccccactagtgggattatattgggttgttgttgttatcatacactgtaatcagttaaaatcaaattctttgggatggaggggtttctttagtctggctaattagacttgatagtcaaatttgttttaagaagttgtgccaaatgttaactcacttgttataatctagcgcgcgcacacacattttgatatgtttgatgttaagctgctaatgaataacgtccttatattttccttgacattgcatgattttatgtttacatatttatctgcgtttaatttaatgctattgtgtccttgcaactgaattttggttctgagtggttgtgatcttaacaggatactcaagaaactgagaaagcaacagaaagtgaagcgagtaaaacagtaaataaagtggttgttgactcgccaaacctagctgattatgttggcaaacctgttttccatgcggagcgcatatacgatcagacaccagttggagttgtgatgggtcttgcttggacttcaatgggtggctcaacactctatatagaaacatctctggtggagcaaggagaagggaaaggggctctcaatgtaacaggacaactaggcgacgttatgaaagaaagtgcccaaattgcccatacggttgccaggaccattttgcaggaaaaggagcctgataaccaattctttgcaaatagtaagcttcatcttcatgttcctgcaggtgctacccctaaggatggccctagtgctggttgtactatgataacgtccttgttgtctcttgccatgaaaaagcctgttaaaaaggacctggcaatgacaggggaagtcacgctaactggcaaaattcttcctatcggcggggtatgttaacaattcttacacctctccttataatttcatgcagcttttgtgtctgatcatctatcatgttttctttttatttttcgttgattttgtctttaatgttctttatgctttaattatttcctgtgtctgtatgtgttacatgcatgcgcatgtaagcataataagagtggtcttttctttttgacccaaccagtgttgggttcctttcttgattttacaaaagctttaccttttggttcaataataggtcaaggagaaagccatagcagcgcgaagaagtgatgtgaaaactataatattcccttcagccaatcgcagagattttgacgagcttgctcctaatgtcaaggaaggccttgatgtacactttgtggatgactacaagcaaatatttgatttggcattt

SEQ ID NO: 77 - DNA, 9227 bp, Nicotiana tabacum
atgcagtttttccgaagaaacccatcacttcacagaatctcctccagattccttaatcaagttcgttttcttttcttttccttttccgaagtataactagcttttcaatttttgtttggcttttcgattatcttactagtgtaacatatatttcatatgtcttgaggttcattgcaaaaactcgttatatttctaaatggggttgagcacgtggtccaatacaattcagtaggacttacagctgtagcctgtagttagaggacattggattaattaattatatggctgcaattcagatattcaaaacgtttcttttccctgtttgcaattttttcctccaagtagtgaaacagtggaattttctccccattcttaggtcaagctatcatctttttgcttaagagttggtttggatgtttacatttattttctaacacaatttgttttggtttgctgctgatatctcatgaattggatacgataggtagtcaaaaccagtgcatattcaaccaagaaagtttacaatgctgggcagccgactgctgctactcaccctcaggtacttctacactgcatatgtagtattgacatttggtagcatagaattaagaccgttgacattaacaaatgataaatgtgcagtaaatttaaaatcttgttttcttggtggttgttttccttgtatgggacatacttcgctgtcctttggagctcctttgtgaatttctgttaaatgttgttacatcactgcatgcagttaatgaaggaaggggagattactcctggcattaccagtgaagaatatatgcagagaaggaagaaattattggagtttcttccggagaatagcttagcaattgttgcagccgctcccataaaaatgatgactgatgttgtaccatacaattttaggcaggatgctgactatttgtacatcaccggatgccaacaacctggtggtgttgcagttctagggcatgactgtggtttatgcatgttcatgccagaacaaagcccccaggtatttcaggaaccattcacttgcttccttcttgttgacaagaagctgttaataagagaaaagcttcgtcctataatttagtgacatttttctttagattcagttactaccatgattttttggtagttagtatacattgtagcaagttaaagattgtttccatactaaaagtgaaaaagtatttttaggacgctctttggcaaggagaaactgctggagttgatgcagctctacagatattcaaggctgaccttgcttaccctattaacagattgcctcaggtaaatcttttttaaaatcatatctccaactgcaaataagtttgagattctttttagaagcgaatacctctcacactgataagtaaaagggcatatgataacatcccttcttttattcctttcaataggacaatgaagtactttatctaaaaagggagtggagacctatttgtctcctttccacttgattatagaaatttatgtcagagaattgaatctgttagagttggcttgtagataccttttgactgttgatgcaattcttaatatgcgtaaaagaattgtttttctcctttttctcttttcttgccggggaaaagaattgttttcctcctttaatatgcgtaaaaggtatagagggaacaaagtggatggaagttagagttttcacctaagttgctccgacacggcaatttaggtgccgcacccatatcgacacgacactagtatgggtgtgggtatgggatccgtaccggatctggtcaaacaattttgggtactttgaccacgacggatggaaaaattcgagacgagatacaatttgattcccaaaatcagaatctaaggtaaatttaaataaaataatataccttatctagaaaatcaatcctttacttatctataacttgaaaataaaaaggaaatccacactttacaagctatacgtaagtaatccacaaaatttctcataatttaaaaatatttttattttttttgaattatttttagtcggatccccgcacccatatctgtactaggatctgtatccccgaatcttagaatttacatctcgaaggatccaacctctagattcgcacccatgtcggacacccgcacccgtgtccgagcaacttaggttttcacatatataggagtcgggcctggcttattactataaattcatgtttgataggacctattactggatgtagcctttcctcataattttgaaaatcaagcaggcatcacgctaggatcggttgagaatataatattatgggtaagaaattgaagaatgaaggttaacagaaagtggacactgtgttccaaatggaaactaggtaaatgatttaggcagacggaatattttttggttggctgtatttggctctcaggttaaccgtttgaccacttaatggtaatttactatttaaatcggcaacacagagaacaggaagtgaagatgtatatatgactgtgttatttgtagagaaccagtttatggtgtaggttttctagttattgtagagcacttgcgtacaagagtttaaattccgcaacatcgataaattcttaccttataaaaaagagcaggaaatgaagacgagatgccgatatcatgattagatctatgtcagcaaagaaaaaatgtcaattatttccttctaagctgtctttcctgtacatggcttcaatgtagtgactttgtttcactttctccatgttccaatttctcttctctaatttttgctggacttgtcagattctctccaggatgatagaaagttcttccactgtgttccataatgtgaagacaaggacttcatcctacctggagcttgaggcctataaaaaagcagttagcaattacaaagtgaaagatttctctgtgtacactcatgaagcccgatttgtgaagtctccagcagagctgaaattgatgagagattctgcatctatagcttgtcaggtaatggtagttctttcatttttgtcaggttcatgggttagagtggtagttcttactcatagaggttcttgtttttattggacatggaaaagcagtctctgggttatagagatggaaagatagagtgtacacttgacactacttttgtatgtttatttgttttccattgaagttgatactcttcacacagttaacatgtgactaaggtattgatatgccagcgaggtgttttcagaattttaaaaagcttatttgcaggtcagctgttatacaatcttaagtaacatgtttgtcattttgctatacgacaaaattttttagaaaggtaaaataggtatttgcatttccctttttttcctcttcttctttcatgtctagggtggtgtcttcaggttgaagatactacacttctgaggatctaaaaaatatttcacaaaaggaaaaagggtacagtcagataaaaggatcaccagtctaaaagaagacggttcttaatattccaaaagttggagtcccagctttcttacttgggtcaacatattcttggtctaattgtgaaggaacagttcttgcatgtacaatcctttctttgataatgtgcttctgtgttaagtagttcagaagctctaggcatgcttaaccaaaagatgtgtatatactactcattcattctatttcacaatcatgatttgcatgttttcttatgagagactggtctagaaaatgcttcttcctattcctggatttgtatgcagttgcctagcaataaagttgccagttatatgggagttgagatattttcctttcactaattcagtccttttttatactgtataaaggatattttttatttcttgatcttttaatgtctgtcttgtctttcggaaacagcctctctacccctcggggtaggggtaaggtcggcgtacacactaccttccccagaccccactagtgggatttcacagggtcgttgttattattgttgttcttttaatgtatatatttttggtaggcacttgtccagaccatgttgtactcgaagttgtttcctgatgaaggaatgctgtcagccaaatttgaatatgaatgcagagttagaggtgcccaaagaatggcgtaagctttttcttgtaataatttttggaagtttgtatatagagaggagcacgttgcaatttctaagtattttagtctaacatgagttgcaggagagtaaatcaaaatgccactaagacctcatgtgtaaacatgcaattgattttctttttcttctattctctgcgattctgataatttgttgtttttcctgactgttagttttggtcatacttctggttgagatagtttcaaggattatacatttttcttttcctgttccacaggtttaatcctgttgttggtggcggacctaatggcagtgtcgtgcattattttcgtaatgaccagaaagtatgtttactgtctttaagcacagttgaatttgaatatcaagcatattgagtagtagtatctaatttgttgttttaacagattgaagatggggactttgttgttttaacagattgaagatggtaaccttgtcctcatggatgttggatgcgagctccacggttatgtcagtgatcttactcgtgtttggccgccctttggaaaattttcttctgttcaagtaagtatagaatccatgattttcttctccgttttccccttaaaactcaagtcaaaccccactcctctgggtaaaaaccctgttagctgatcaaagtcatagacaaccttccatttcagaaagaatgcactgacctaaattgaaaccccagactaccaaaagcaatctagaaagacaaacggtaaaatgaaaatcatcaggtaatgtagcctagcagctagcttcaccctccagtggtatgagttatgaatcttaattccagatcctcaatggccttgctgatttgatgtggatgtgaagaatgagaatgatataatcatataaagttcctccttattagaaaaacaaaatttcaattttacttctaagctacagattatgcttgagaaataaattcttcccttggtatggttttaaattgctacttttctgtgatatagtctctatacattattgtctggaacttagtgatacgctccaagatacatttcaggaggaactttataatcttattttggagacaaacaaggaatgcgtggagctgtgcagacctggcacaaccatccgagaaatacaccactactcggtactattttagttaatccatctcgtaatttcttttggtttatattcaaggggtagctgagagtaggaatttaattttttttctcttgcctttcatagacttagacccagttatattgccaagttacattggtagtctcggtgatagaaatttgggtacagttgtgaaggccctactcttgctttatgttttgcctaattctcaagttacactgacttccacctcctattgtgaatagcaatgttgcttcaaagttttcgttcctatgcatgagccgaggaaaatgaggcttgatggcattttcgaagataaggaaaaaagtttaattccttttaagcctttgagtatagaggtgttgggaagagatagatgccttttgattgccctcccttgatttgaaaatagtatttgttcccccatttcttcatatatgatgaataatgctttgtaaaataagccagtaaggtaatgattagaggtgtctaattagtgtagtgtgtggtaattgattctcagtgaagggtagtattacctggttgatgcaaatgctttatgaattaagggtcattctctgcatttgttgttagggcagctgttaaaggtcttattactgttcaagatatgggcgtatatggtatatattctgtagtgagtaattgccctatatcagcatgctcttttctttagatacttgaggactgccaaggtctcattcttttttttttatttgatgtgtataggtagaaacgctgcgaagaggattcaaagaaattgggatactaaaaaatgatcggcgtggaagatatgaaatgttaaatcctacaaatataggtctttccttttaacccttactcttccgctgcagatataagtacaaatgcatgtgcaatagcagcagaaacctgctccctctcaattgtcttcacagttgctaatgctattcctattatgctttttgctgaaaagagaaatgatttcttgtaccgctgcaaccatctctgaatgaatttggtttgttcaattatatttccaggtcactatctaggaatggacgttcatgattgttctacaattggaaatgatcgacctctgaaacctggtgtagtaagtttccttccttactgatgattgctttgatatttgaaaataatcgggaaactgctaggtttgcaaaagaaattggttgtcattattttgaaatcctcctaacgaatgaggaccagtgacttgctcatttggaaacaaatgagctttgccataatgcatcactctcttttagcaatttacaatgagttttcctccataggatagttcagtcattctctctttgcttcttgactggattacaatatgaaccaactaagaatgcttatgtttttagagccatgtggtcaaatttcccttttccttcacttttttcatttttatagagatgcaaagggttaaaagagaggattgaatgatgatatatatgaatattttctaaactgcttttgtcatatgcacctctttggtcctattgcagcttctaatttcatcacttctactagtagttacatggagaaagttaaattcagaaatgaagttggttaggttacatggagaaaattaaattcagaaatgaagttggttaggtttatttctattgaaggatgtgtacatcagggtagtgcgtgtatttgcataaaaattatgtttgaaatatctgacggtccaattagcagaaagatcaaagtatcttttgcttctctctagattctatatagacctttgttttgattgattaatttgaaatatttgaaatgattaattcctcgaccgcttagttcattaaccccggcttcatacacgatgcaatttttgttattgataaaggtttcgttcctggtatgtctactctttatcaaaaagtaaagctcttgtatatcttttcattctgagtcacaaggaatgtaatattcctgcagaatgtgtaatgttatatgcaattgtagtaaaatttctcagtagctcgcgcatcttgttttcatgttggtactgcaaactgttaacttatactttatgtataatccatttcatgacaagtaccttgctcttgtgaaaggtacttaacgtccaacatgcttgcttccatgtatgaaaaattattagttatcccattttgctcctttttccttcattcttctaatcataaaaaattggaatatgctcccgacctgtctgatatgacaataaaaacatacacaatatatatcaagtcagctgttatatgcaaaattactgaaggtaattccagtaatacagcttattggtgtcagcggtagatttatgttaaattatgctttaactgaggtctattttgccagtgatatctgtatccatgcatttgtttttagtccttacaaaaaacaatttcagaactactatgtttttgaataagaagcaccatgaacatgctacttagaggtcttagtttgtataatttatgttgatcatatctgtggagaaatatgctaattttgcgtgggccgtggcatttgtatttgaaagaagtacatgacttttgattgttctgagattatgtgcagagtctagttctttgacttcgggactatggaaaactttgtgtttactctacattcatacatctagacaaggtcatggccaattgcgaaacatgctttacgtttttttaaaagtgacggagacgcatatagctcagaatgatgagatgaaattggacaaagctaatagtctaggataaaattgcctggtcattgtttagacatttgtaaactcctgttccctctgtttgtttctacattaaccttgatgaggcggtcattgataagaagaatctctgaccccataaatagatgagtccttttcatcttagcttccaattacttgtgatttctgcaagaacttgtgatcaatcttcatggactgttatatgtaggtcatcacaattgaaccaggagtatacatcccttcatgctttgattgtccagaaaggtaatacttgttacctcatcaaattaatgttccttttggcatgcattcagaagttactgtatcttagatcatcctccagattcttggtttattgaactggttctatctgccaaaatgtattatggtggatggacgaagagttactctttcatgcagaaaagattgagaatcatataaagatgtctgttctaggtgggtcaggtagatcttgtaggtctagtcaacatgttaatctaaggacattgtagcagaagtagtcgtatcgtgcaaaggagtcccagtttggttgggctttcagtgaatgactgatggctacttgtatgttcaaccgagaatgggatcaggaacctttacttcgaaatttcttttgcaaggttcgagaaaacttcccagaaacaaatagctcgaaagaaatatgaaagaaatattccacgtatcaatggcatattctggctgtcccattctagggaaaattgttgcttttgtcataaatcttagggagaaagaattattgctcacttgaactaagaagcttcatctgctgattcatctattgttaaggagctagattattctcttaccccaataaggaacaacgtgtctgtttccttagaattcttgatttttactcacttatatatgtctatattcacttatgctcattcaggttccaaggcattggatttaggattgaagatgaagtccttattacagaatcaggttatgaggtatagttacagaaatcgttcaattgtttgaacaaccgagttatacaagtaccagttcatatgatctctgatactttgatcacttccgacacttgttagcattcaagacctgattttctgccctactggaaacaggtacttactgcatccataccgaaggaaattaaacacctcgagtccttgttgaacaactttggcagtgggagaggaacagaaattagagctgctctcagt

SEQ ID NO: 78 - DNA, 1431 bp, Nicotiana tabacum
ctactcacctctcacaaaaaccatataattctccttccctttcttctctacaaaatcttcatttctctccaaaaacaaactctcatggcttcttctactagagtttttgttcttctccttctcataatcttcaactttctctacatctcagcacaaaaaaccattaaacataagcctttttcaatgtcatttcctcttacttcaacatctttatcacataactcttcttctaaagctctttttctttcttcccttttggcttctaatcaaagaaaacaagctccaaacacaaaaactgtgtctagaattccatctttgaactataaatcaactttcaaatattcaatggctttaattgttacacttccaatagggacaccaccacaaaatcaacaaatggttttggacacaggcagccaactttcttggattcaatgtcacaagaaaattccaaaaagacccccaccaacgacgtcgtttgatccttctttgtcctccactttttctgttcttccttgtactcatcctttatgtaagccaagaattcccgattttacccttccaactacttgtgaccaaaatcgcttgtgccactattcttacttttatgctgatggtactttagctgagggtaatcttgtccgtgaaaaaattacattttcacgttcccaaagtacccctcctttgattcttggttgtgctacggagtccgaagatgccgagggtattttgggaatgaatcttggacggttttcttttgcctcccaagctaaggtacaaaaattctcatattgcgtgccaattagacaaggtagccatgcagttaaacctagtggaacattttacctaggccaaaaccctaattcccatacatttcaatatataaatcttttgacttttcctcaaagtcaacgcatgccaaatttggatccactagctttcactgttggcatggtagggataaaaattggcggcaaaaaattaaacatctccggtagggttttccggccaaatgctggtggttctggccagacgatcattgattccggcacggaatacactttcttagtggaagaagcgtacaataaggtcagagaagaaattgttaggttagttggtccaagattgaaaaaaggttacgtttatggtggtgcacttgacatgtgcttcgataaccgtccgatggaaatcggacggttgataggtgatatgacattgcaatttgagaacggggttgagattttgatcaataaggaaaggatgttggatgaagtagaaggtgggatccattgtgttggaatcggacggtcagaatcactcggaatagcaagcaatattattggtaatttccatcagcaaaatttatgggtagaatttgatatgagaaatcgaagagtaggttttggcaaaggagagtgtagtaggcaaatg

SEQ ID NO: 79 - DNA, 2586 bp, Nicotiana tabacum
atggctgcactcaatttcttcataatcttcacatcactagtcttaccaattgcatctgatcctctgttgtcaacttatgttgtccatgttgacaccaaagccaagccatctcattacttaactcaagatgaatggtataattcagtggttgagtcagttcttgcaaacaaaatggactcagattctacttctccaagattgttctactcatatgatgtagtgttacaaggttttgcagcaagattgactgatcaagaatctgaaaaactaaataaatttccagaagtcattcacattttcaaagatcagtctagaatcaagcttgacacaacacgttcgccgaattttcttggcctaaacacaggttatggtctgtggccacaatctaactttggagatgatgttataattggccttgttgatacagggatttggcctgagagtgagagtttcaaggacaatggtattggtcctattccaacaaggtggaaaggtaaatgtgttgatggaattgaattcaacgcgacgagtagttgtaacagaaaacttattggtgctaggaatttcgttaagggtgttgagaatgactatcatcatcaatcggcacgagatcaaaatggacatggaacacatactgcttcaactgcagcaggtacagaggtaaatggtgccaatgtatttggttttgctaaagggaaagcacgagggattgcgagtaaagctaggattgcaatgtacaaagcttgtgggagtagttcttgtgcagaatctgatattttagcagctattgaaagtgctataaaagatggcgtagacatactttcgctctctttaggatacgatgatgctccgttttatgaaaatccagtggcaattgcaacatttgctgctgttaaaaggaacatatttgttgcttcttcagctggaaatcttggaccttatccattttcagttcacaatacagcaccttgggttacaacagttggagctggatcacttgatcgcgatttccccgttgaaatcaacttatcaaacaacaagacttttgttggttcttctctttatccagggagaatcagtggtaaaagttactctcttgtttatattgaaaattgttctataatgacaatcgatcgttctaaagttgaacgaaagattgtagtttgcaacactagtaaaatcgaagctcttagaaatgggattttaattcagaaagcaggtggttttggactgattcaattaaatcttccaactgaaggagaagggattagagcaatggcttacacattgccttctgcaacattgggttataaagaaggtatagagcttctttcttatatcaaatccaatgctaatccaagagcagggttcgtacgtcgaaaggatacagtaattgggaaaaaagttagagctccaattgttgctagcttttcttcaagagggcctaatgttgttgttcctgaagtcctcaaacctgacctcattgctccgggtttgaacattcttgctgcatggccaggtaaccagagacggatccaggatttataccttatgcattcaacctttattctttaccattgaccccacgacacttttaaacttatgaggtaggaattttatactttttgaaattgttgtgatttttcatattgcgtggaagcaaccactaatgcttatggtaggataggctgtctacatcacactccttaagtgcggcccttcgcccgaccctgcgtgagcaagggatactttatgcactagtctaccgcttttctttatttagtgattcttcacattgtgtgtgtctatgcaggtgacatttccccaacacgtctcaagatggatccaaggagagtgaagttcaatataaactcgggaacatcaatggcgtgccctcacatagccggagtagctgcattagtccgcgctgttcatccagattggtccccggctgctataaaatccgcactcatgactacatccacagcattcgacaatgcacaactccctatcataaaacacgaagacatggagctagcaactccgatcagcattggagccgggcacgtgaaccctgaatcggctattgatccgggcctaatatacgacactgatacatcagactacatcaacctactatgcagcttgaattacacagagaaacaaatgaaacttttcacgaacgagtcaaatccttgctcgggtttcactggatctccacttgatcttaactatccatcactttctgttatgttcaggcctgattcctatgttcatgtagttaagaagacactgacacatgtcgcggtatctaagcccgaggtgtacaaagtaaagatagtgaatctgaattctgaaaaggtgagtttaagtatagagccaaggaagctgattttcaatgaatctttacagaaacaaagctatgtggtcaaatttgagagccattatgcattcaacagcagcaggaaaatagctgagcaaatggcgtttggttcgatattgtgggagagtgaaaagcacaatgttaggagccccttcgctgttatgtgggttcagcaaaatttcaataacagtagattatacaaa

SEQ ID NO: 80 - DNA, 14473 bp, Nicotiana tabacum
tcaaaatgccaaatcaaatatttgcttgtagtcatccacaaagtgtacatcaaggccttccttgacattaggagcaagctcgtcaaaatctctgcgattggctgaagggaatattatagttttcacatcacttcttctcgctgctatggctttctccttgacctattattgaaccaaaaggtaaagcttttgtaaaatcaaggcacttcagaaaaggaacccaacactggtggggtcaaaaagaaaagaccactcttattatgcttacatgcacatgcatgtaaacacatacacacagaggaaataattaaagcataaagaacattaaaggcaaaatcaacaaaaaataaaaagaaaacatgatagacgatcagacataaaagctgcatgagattataaggaggtgtaagaattgttaacataccccaccaataggaagaatttttccagttagtgtgacttcccctgtcattgccaggtcctttttaacaggctttttcatggcaagagacaacaaggacgttatcatagtacaaccagcactagggccatccttgggggtagcacctgcaggaacatgaagatgaagcttactatttgcaaagaattggttatcaggctccttttccagcaaaatggtcctggcaaccgtatgggcaatttgggcactttctttcataacgtcgcctagttgtcctgttacattgagagcccctttcccttctccttgctccaccagagatgtttctatatagagtgttgagccacccattgaagtccaagcaagacccatcacaactccaactggtgtctgatcgtatatgcgctccgcatggaaaacaggtttgccaacataatcagctaggtttggcgagtcaacaaccactttatttactgttttactcgcttcactttctgttgctttctcagtttcctgagtatcctgttaagaccacaaccactcagaaccaaaattcagttgcaaagacacaatagtcattatattaaatgcagataaatatgtaaacataaaatcatgcaacgccaaggaaatacaaggacattattcattagcaatttaaattggtagaattctatatatttttctttcagtacagaccaatatgagggtagaaataacatcaaacatatcaaaatgtatgtgcgcgcgctagattataacaagtgagttaacatttggcacaacttcttaaaacgaatttgactatcaagtctaattagccagactaaagaaacccctccatcccaaagaatttgattaactgattacagtgtatgatataaatgcaaatcatgcatagatactttttaagatacaagggggacatagcatagaaaatgaataccaggcgcttcccttgcttgttcttagttaacatttcaaaagaaagtgcttcccctgcttgtttggtgtgatattgccagataagtgatttcttacgttttgttaaccatatttaatccaacatgagacagtaagacaagttgtaaaaagacacttctgtgcctacaaaactacctattacactgcatcttgtatttttattttacgcgtagataaaacttagaagcactaaaatacattgtagcatacataattacaaatagcaagaattacctgaagtactaaacactatatttttgctttttaatgtttttcatttacctgtaaacaagtatcttcattagcagacttctgcgtttgattctctgctccctgtgcttcagcttcagcattattttcagaggcctcatcatcattgctaccgtttgctgactcagctccagcttgaatttcttccttagacttgatttcgtctgatagatggatagattctgcttttacctcatctacctccgcattctgaggctcaatctctccatcttctctgacaagctttagagctatctgaaaagcaagaacaggatgtgcaaagtatcagagcatgaaaacgattcaaagtgttcgtgttggatttcatgaaataaccatcagttttcatcaaaagttgactaggcacgagactcggacaatttcatcattagatgtgttatacaaaagaggacaggtcacagaaccttgcgataaattttttcaatctgcttctgcagattgcgtacaccggcttctctgcagtaattttctattaaagcaagaagagctgaatcggtcacttcaacctgaaataaagaattcatgaagccaaataaaattagcttattgcaagaaacacttcaagtgtaacttgtgaaatattttgaaaaacaacatcaaggcatcaattgaaaatctttctacaaccacatatactaactgctaggatagttacacgtgttaaaatatttaaaccaaacatcaaccattcaaggctttgaattgcaatcaattgctaatataaatcatgcacacttaattttccagcttgatatcacatcttttttttgataaggtgaagattttattaaaaacagtatcaagctgatactgtaaaaatacaaggacactgctggcttaaaaacattaaaatcctaagcggtctagcatgtccagcttgatatcacatctctgcatctgagaaacagcctcagcatgttaaaagcctgagagacaaagagatgacatatacatggactcaaatgttgcatcttttcaactagattacatatcaactcgagtaattttacaggagcattagggagctagcatttcccgagaaatggtacccaaagctctaccctagtcctgtcatatgtttgccattagataagcataaagccactactatgtcatcaaaagtaccaacagcctcaagatactgaaaaaattagaactgctcctatccgctctggagggccaaaacaaaccaaagtagccatcagccctcccacatatcaacttattaacttctgacgcccatatttagggtggatttttttttttttttttttttttttggggggggggggggggtaggcacagtaaatgacaccgcagatatagatgaggtcaaatgtgtcattttgatgcccttaatcagtaagtatgcagctcccttttcttcaccagacatccatatggcatgtaactcaactgaagatcacattagagagcaaaatataagatccaccgaattccattgatctcatctttaaggctgtgggagaacatatttactgcagtcatcttataacttaagctccctcaatagacattatcaagtgttttttggagtcatcaccaccaatcttggcattgtatgatgattccttgtacagtaataaaacattcactactgtgtactagtctagtttttcttttacacgatggtcaaattgaagtcaacaacaaaaaaaacaaaacacttggcatattttaaacatccatcctgctttagtccatgccacactcaaatctgttagacaataccatccagcaaccccagcccaccaggcacatgtatccctaccagtaagaaactcattatacctccatctaccaatagagattggcgactaccacgacagatccaccttcaattgcgtttatattcccagtaaagtgtggcacagtggttgtgttaatgatgcacgagcacattggctagcaaaggcagtcacagtttggctcggtcaagcaaacattcctcaagagaaagcagcacttgagaggatgtatacagcaatgtggactcattcagttgtttatgtgaaccacttaaatacttcttgaaaagtatagtgatggaagagtttgtattaaactttataatccattagctttggaggtaagtatattccaaatgtagaggcttaagatgaaaatgatatcaatacatcaaacagtatatttcctaggaaatattaaagcatatggccaaaaacctataatgggatttactatatccgtgcgatttttttcctttagccatgttccatatggaagggtgtaaagagcttgatcccctgaactttccaatcatatgttttattccataaacttctaactgaataaagcttttcacattttactttaagaagttacattcttgcccaatcatgtttcaaacattttcccaacagaccaatgtctgcttctgaaatgtcaaaaattgggagcggaaaaaatacaaaactattcacccgataatgaatatgcacaggagatgatgaaagagatgcaactagagacgtttctataagacatacctgctcgggcttgatcccacatgtttcacgagtagctttctccaaataatccctggctatgtgcactttctcatccgtaatgtaaccagcaattgaaattacttccattctatccaaaagaggattaggtatcatttctacaacattggctgtgcagacaaacaaaacctacagccgcaaaaaggaaaatgatctacctcaaattatgcactcaaaaaatggataatgtgcagatgtcattctcatataaagtacagtggaataggtaattgtattaagcaaagaggatagaaaacactgaaggtgtcaaagctcctttttttcaaattttggaagtacattaaaacctagaggttggattttataatttcttcaggttcatatataactcaacatccataacaaggttttgatatagcctccctccccataaccaagccagacccaaaatgctactaaaataatcgaaagatgccatcttctttcgacagagccctttggaaatataacacaaatatttaccattatgaaaaagacatagtaacacacagtaaattatcacattaaaggacaaaacaaatgaaattgtatgcgaatatacccatcatccttctctctctagccatgttgttgatttgctgatgtttgatataataaaatgaaatagtaccggtaactgcaaagtcgtcatatttgaattatgggccaaattctttaatcaataggtaaactaacgctcaacactcaaagtctatcgcataattgtaaagtcgtcatatttgatttatgggccaaattctttaatcaataggcaaactaacgctcaacactcaaagtctatcgctccaattatcggcaacttcaagaggaataaaaccatatccctcatcagtaaagccatcaaagataatatgaacagacagtaggaaatctcaatgcatcaacctttttcctattgaatgatcaccaaaaccaatgccaatgaaacctagtttttctcaagtgttagatatagaaatgtagttgtcccacattggaataggtgtagtatgcctttgtatagagtagctataaataagcccatcttgtattgcattagacacacaatatcaatatatcatattttctcccgtgtcttctcacatggtatcaaagcaatcgtgagagatttatcgttgtgcataaattccagcgactccgggaaggaaaatcagttgaccggaagccttttccggcaggtctgccgcaagtaaaaaaaaagccacttcgtcagtgttgtgcaaaaaaaccaacaccaccacgaagtagatcgggctctggcaaccaacccataaaaaaatctccgtcagaataccctccacgcgccgtcacttgctaccggaagaaaattttccggcgaagttccgacgtcgcgtgggccaccttccagccattttttggcgacgactcttcaggacaaattattccccttgcaattccgagcctacccatccaggttacaccaaattccagacaacttatatattttttccagcatgcatagtgatttcaaaagtggacttccggcaattttttgaaaacgtttcttcagaacagttgggtcatctggtaattccgatcctacccctactgtttttatttcattccgaccactttgaattttcccggcagctacagtactattccgactgctacagtaatattccgatagctacagtatttccttattctgtttcactgttccttactctgttttagtggattaaatttgattatttctataatttggtaataatttgcaacgatgtctatgggaattgatgcttttgggtctaaaaacatgagttctggaagctctagtgttatgattacttcaaaacctttaatgtgaggttcaaactacttagcttgggcttcatctgtcgagttgtggtgtaaaggtgaaggtgttcaagatcatctaattaaacagtctagcgaaggagatgaaaaggcgatagcgctttgggcaaagattgatgctcaattatgtagcatcttgtgccgttctattgattccaagttgatgcctttgtttcgtccattccagacatgttatttggtttgggcaaaggctcgtaccttatacactaatgacatatctcgcttctataatgtgatatcacggatgacaaacttaaagaagcaagaattagatatgtctacttaattgggtcaagtacaagcaatcatggaggaatttgagacattaatgccagtttctgctagtgtggcaaaacaacaagagcagcgacaaaagatgttctagttcttacactcgctagacttcctaatgatcttgattcagtgcgagaccagattttggctagtccgactgttcccacagttgatgaattattctctcgattactccgccttgccgcaccaccaagtcacccagtgatctcatcacaaatacttgattcctctctcacatcgcagacggtggatgttcgggcgtctcaaactatgaagaacagaggaggacgaggtcgttttgggagatctagacccaagtgttcttattgtcacaaacttggatacactcgtgaaatgtgctattccttacatggtcgtccacccaaaaatcttacgttgctcagactgagactacatgtaaccaaggtttttctgtatctaaagaagaatataatgagctccttcagtatcgagcaagtaagcagacatctccacaagtagcctcaattgcccagactgatactccagttgttggtaattcttttgcttgtgtttcccagtctagtactcttggaccatgggtcatggactcaggcgcttctgatcacatctctggtaataaatcacttttgtcgaatattgtatattcacagtctcttcccactgttactttagccaagggatgtcaaactaaggcacaaggagttggacaagctaacccattgtcttctatcaccctagattccgttctttatgtccttggttgtccttttagtcgtgcatctgttagtcgtttgacttgtgccctccattgtggtatatatttattaatgattcttttattatgcaggaccgcagtacgggacagacaattggtacaggacgtgaatcagaaggcctttactaccttaattcactcagtccttccacaacatgtctagttactgatcctccggacctaatccactgtcgtttaggacacccaagtttatccaaacttcagaagatggtgcctcttttaggacacccaagtttatccaaacttcacagtctacattagattgtaagtcgtgtcagcttgggaaacatacctgagcttcctttccgcgtagtgttgagagtcatgtagagtctgttttctccttggttcattctgatatatggggtcctagtagagtcagttcaaccttgggatttcgttattttgttagtttcattgatgattactcaagatgtacttggcttttcttaatgaaagatcgttctgagttattctctatattctagaatttttgtgctgaaataaaaaataaatttagtgtctctatttgcatttttcgtagtgataatgccttagaatatgtatcttctcagtttcagcaatttatgacttctcatggaattattcatcagacatcttgccttatacccctcagcaaaatggggttgcagagagaaagaataggcaccttattgagactgctcgtacacttctaattgaatctcgtgttccgttgtgtttttgcggcgatgtagttctcacagcttgttatttgattaataggatgccttcatctcccatcaaggatcagattccgctttcagtattgtttccccagtcagccttataccctcttccacctcgtgtttttgggagcacatattttgttcataacttagcccctaggaaagataagttagctcctcgtactctcaagtgtatcttccttggctattctcgtgttcagaagggatatcgttgttattcacttgatctccgtaggtatcttatgtcagctgacgtcacattttttgagtctaaacctttctttgcttctgctgaccaccatgatatatctgaggtcttacctataccgacctttgaggagtttcctatagctcctcctccaccttcgaacacagaggtttcacccatactaaccattgaggagtctagtgttgttcctcctagttccccagtcacaggaacatcactcttgacttatcatcgtcgtctgcgccctacatcaggcccaactggttctcgtcctgcacctaaccctgctcctactgcggaccctgctcctaggacactgattgcacttcgaaaaggtatacggaccacacttaaccctaatcctcattatgttggtttgagttatcatcgtctgtcatctccccattatgtttttatatcttctttgtcctcggtttccatctctaagtctacaggtgaagcgttgtctcatccaggatggcgacaggctaggagtgatgagatgtctgttttacatacaagtggtacttgggagcttgttcctcttccttcgggtaaatctactgttggctgtcgttgggtttatgcggtcaaagttggtcccgatggccagattgatcgacttaaggcccatcttgttgccaaaggatatacttagatatttgggctcgattacagtgataccttctctcttgtggctaaagtggcatcagtccgcctttttctatccatggctgcggttcgtcattggcccctctatcagctggacattaagaatgtcttttttcacggtgatcttgaggataaggtttatatggagcaaccacctggttttgttgctcagggggagtctcgtggccttgtatgtcgcttgcgtcggtcactttatggtcttaagcaatctcctcgagcctggtttggtaagttcagcacggttatccaggagtttggcatgactcgtagtgaagctgatcactctgtattttatcggcaccctgcttcaagtctatgtatttatcaggtagtctatgttgatgatattgttattactcgcaatgatcaggatggtattactaatctgaagaagcatctcttccagcattttcaaactaaggatctaggcagattgaagtactttctaggtattgaggttgctcaatctagctcaggtattgttatttctcaaaggaaatatgctttagacattcttgagaagatagggatgataggttgcagacctgttgatactccaatggatccgaattctaaacttctgccaggacagggggagccgcttagcgatcctgcaagctataggcggttggttggtaaataaaattatttcacagtgactagacccgacatttcttatcctgtgaatgttgtaagtcagtttataaattctccctatgatagtcattgggatgcagtcgtccgcattatccggtatatagaatcggctccaggcaaaggattactgtttgaggatcgaggtcatgagcagatcgttgggtactcaaatgctgattgggcaggatcaccttctgatagacgttctacgtctggatgttgtgttttagtaggaggaaatttggtgtcctggaaaagcaagaaacagaatgtagttgctcggtctagtgcagaagcagaatatcgagcaatggctatggtaacatgtgaactagtctggaccaaacaattgctcaaggagttgaaatttggtgaaatcggttagatggaacttgtggaacttgtgtgcgataatcaagatgcccttcatattgcatcaaatctggtgtttcatgagagaactaaacacattgagattgattgtcacttcgtaagagagaagatactttcaggagatattactacgaagtttgtgaggtcgaatgatcaacttgcagatattttcaccaagtccttcaccgatccttgcattggttatatatgtaacaagctcggtacatatgatttgtatgctccggcttgagggggagtgttagatatagatatgtagttgccccacattggaataggtgtagtatgccctttgtatagagtagctataaataagctcatcttgtattgcattagacacacaatatcaatatatcatattttctcccgtgccttctcacatcaagtatcaagagaacaacattctacttacgctaatcttattacagtcataaagacagagacaaaggtaacacagacgtgaaataaaatacttccagataacctttcattatggacaataaaagaaacatgttcagtcacgaaactttttccaaacttaattaaggtaagagacgaaagaaaacatcaatcagtaaagaaaaagaaggggaaattaaaaggtgaaaaagcaaaatgatattagatatttgcaagatttttaatatcacattagtccccactcatcaaatgatggtagagggcatttcataagggccaatcaacagccacaacaattcgataagtgctccaggaaacaactaacctttgataaatcaataggaacatcaagataatgatctaagaaatttgcattctgttctggatcaagaagctccaacatagcacttgctggatcaccagcatgtcctcttcccaactgccatagaagaaaaaatacaaagctattattaaatttgatcgataattatacacattctttaaacatttagattgcagaagaaatccaagcaaaaacataatatgttaatgcccaagattcttccggtggtcatacacagaaaagcaagatttaaatagtggaaaagaagttacacttcactcatagtcaaagcatataattgaagtatgaactcacaaaccataaaataccttgtcaatttcatcgatcaaaacaagaggattagcggttcccacactttttaaacattgcaccatcttccccggcatggcaccaatataagttcgtcgatgtcccttgaagtgtatcccaaagttagtcatgaaagttcaagattatgtgcacaacaaaacaactctgttttagctggttagatatttctgttacctttatttcagcaacatcagacagccctccaacagaaaatcggtaaaatttgcggttcaatgcacgtgcaattgaacgacctatactggttttgcccaccccaggagggccagagaggcatatgattttccctgttcaaacaaaaataagcaatgagtttgtttagttcctgactcagattcacaaattaaactgagataaatcagataaagccgcacatatgaaagacagtgccagtgtataattgcgattaatatcatcacttgaatctaacattgtcctagctatggtgcaattcacatttttctagagttgccctttgtctgttttttcctcaacacttcatagttttcaaagattttcctcaacaaacaactacatctcaagttcaaatgtcccaaagatatacaagtacaactggcagtgaaagtaagttatcaataaaataccatagagcgagtgcccaatcatggacaacacaatatcagaatttaagaagaacaccaacaaagtatggcccaaggtgcagctatttaactcacattaattgcttttcaagggaagaaattaagctcaagatatatttctttactccacagataatcacaagaaaacattggaggaactctcgactgtcacaaaaagtattacctaagtttgaccaataaatatttctcaaatgccctaaaatgttcacttcttccaatttactcgttccaatttgatgtcaatatagtatgtgggaaccataaatcccatgttctatggatatattttccattggtatattataatgttatgaaaatggacggtaaggagatggctggatcattttccgttcttttaatatgattatagctgaaccttataaaactgaggattttattaaaaatgagggtcattatttttaaaaaataaggcatttaccaaccttgtgaggttcctctgagttttcccacagctataaattccaagatcctttccttaacatcggttaacccatagtggtcttcatcaagaatttgttctgcccgtagtacatcaaagttttcatcactgcattttggatcataaaagaagaaaagttcaggaaccaatgcaatacacccaggcagagatcaaaactataaagccaacaccaccaccatcagcagcaaacaacacgaactatgacaaatcaagcccccatcttaacctacataaggagctcatcataagtacaatcctagttttgctgctctcatgagatcctggtctaaactgatacattgggatgtcaaggaagcatcctcaaagccagaagcatgacatgtaagaacccaaaataaggaacaggaggagaaagaaaagttaaagacaaatggatattactcgatagaaatttaggcaagtcacatcactaggcagtaaggttaacttggaagcctagcaaatttcagacaataacaattttatttctcataactgtttagccagcttctaacaaacagattcctctagtacagctaaccaaggataaggttaacatcagttggattgaacccaagacaatgtaaggtagaatagatagacaacaaacctgtaactaccccatggcaaggcagtcaaccaatcaagataattacgtgtcacgttaaattcactggaactagcttccaacagttgcagttttgtcagttcttcttcaataacttgcataacatgtactggtattttttctttattaggctccaatctttccctgaactttgctgcagtaataaacaaatatagtgtcacaccattagatgtaattaaaaagggaacaaaaaactgcaggtttcccttagtattgaccagaaaaatccaagcccttaaagcgaacctaatcattaggcagtttcttctctcaatttcaacaccaaaaccaggtctaccaaaacaatgctacaatgcggagctcaactttatctttgtgaaaattatagagaaaaaataatgagaaccgcattttagggtttgcagtaacgtctattatcaccaaaacctggaagaagcaccttcttaagcatcacactcctcaacaggagcaaaggagagaagaaagagcacataacagaaaaagcaagtaggcttctaattaggaagtgcactgaagggaaacaggacagaattcatgagaaaaagaagacattggaggaggaagataatctgaatcatgagcagtccataacatgaataaacaacaatgcagtgctaaaacggaaaatgtggccttccagtaaatccatgttgaatttgtgccacattaccaaatatggtagacagtaacctttcggaattgaagttgaaggattccagtattgtcttattaagtgctttcgtgaaaacacaaaacagccccctataggtacaatgtattctaatctgtcaaaagtttggaatgtctcaaatagttttagaaagcatgtcaataaagttggttggactgtgtacaaagaaaattcaaccttcaatttcctatatgtaaagccaattatcgcttgaatgctattcatgcttctagtgaagattttcaatggtaaacaggagatcaatcagccaccataaaacttttacaacagaaagggcaaaacatattgcaaatggccttttctatgctactgctaaatggaactttaccagggacaacataagatgtttcactggccagatgggaaaacacgtctggccataataaatccaaaaagaacattatccatttcaataataattaagagacaactaaccagaaagagctgtcttgtcatcagtctccaaacctagttcctgcattaagccaatcaaaaccacgtcataagtacttttttttcaaatcaactctttgtttaaactgtgaatcaaacataagaaccagaagcttaacatatatattatctaggaataaacatatgtaagtactaagtttaaggatgataacacaaaaaaagctgcacataatccacatgccttctttatggcctttaattgttcattcaacaaataacggcgttgctctccgcttattttttcttcaattgctcttgctattgattcctgcagaaaacaaagacgacgtaaaatgctaaatgcatgcataacaactattcaaagttctggtatgcgtcttgacgtgcatttacctgaatcttactaatctccat

SEQ ID NO: 81 - protein, 370 aa, Nicotiana tabacum
MALRFSLIFLFSLFLTTSLLLSVNGNINGGEDDDILIRQVVGDDDDHLLNADHHFTIFKRRFGKTYASDEEHHYRFSVFKANLRRAMRHQKLDPSAVHGVTQFSDLTPAEFRRNFLGVNRRLRLPSDANKAPILPTEDLPSGFDWRDHGAVTSVKNQGSCGSCWSFSTTGALEGATYLSTGKLVSLSEQQLVDCDHECDPEEKDSCDAGCNGGLMNSAFEYTLKAGGLMREEDYPYTGTDRGTCKFDNTKVAAKVANFSVVSLDEEQIAANLVKNGPLAVAINAVFMQTYVGGVSCPYICSKKLDHGVLLVGYGTGFSPIRMKEKPYWIIKNSWGEKWGENGYYKICRGRNVCGVDSMVSTVSAVSTSSH

SEQ ID NO: 82 - protein, 510 aa, Nicotiana tabacum
MGAKVFLVALFLSALLFPLASSSNDGLMRIGLKKMKFDQNNRLAARIESKEGDVLRASIRKYNFRGKLGDSEDTDIVALKNYMDAQYFGEIGVGTPPQKFTVIFDTGSSNLWVPSSKCYFSVPCFFHSKFKSSESSTYKKNGKSAAIQYGSGAISGFFSQDNVKVGDLVVTDQEFIEATREPSVTFLVAKFDGILGLGFQEISVGNAVPVWYNMVQQGLIKDPVFSFWLNRNTEEEQGGEIVFGGVDPNHYKGEITYVPVTHKGYWQFDMGDVLIEGKATGYCESGCSAIADSGTSLLAGPTTIITMINQAIGASGVASQQCKSVVEQYGQTIMDLLLAEAHPKKICSQVGVCTFDGNRGVSMGIESVVDEKAGRSTGLQDGMCSACEMAVIWMENQLRQNQTQDRILNYVNELCERLPSPLGESAVDCGKLSSMPTVSFTIGGKVFDLVPKEYILKVGEGAKAQCISGFTGLDIPPPRGPLWILGDVFMGRYHTVFDYGKLRVGFAEAA

SEQ ID NO: 83 - protein, 764 aa, Nicotiana tabacum
MGSFLCFSVIVVLLVLQPCLAKKVYIVHMKNHQIPSSFATHHDWYNAQLQSLSSSSTSDESSLLYSYDTAYSGFAASLDPHEAELLRQSDDVVGVYEDTVYTLHTTRTPEFLGLNNELGLWAGHSPQELNNAAQDVVIGVLDTGVWPESKSYNDFGMPDVPSRWKGECESGSDFDPKVHCNKKLIGARFFSKGYQMSASGSFTNQPRQPESPRDQDGHGTHTSSTAAGAPVANASLLGYASGVARGMAPRARVATYKVCWPTGCFGSDILAGMERAILDGVDVLSLSLGGGSGPYYRDTIAIGAFSAMEKGIVVSCSAGNSGPAKGSLANTAPWIMTVGAGTIDRDFPAFATLGNGKKITGVSLYSGKGMGKKVVPLVYSTDSSASLCLPGSLDPKMVRGKIVLCDRGTNARVEKGLVVKEAGGVGMILANTAESGEELVADSHLLPAVAVGRKLGDFIRQYVKSEKNPAAVLSFGGTVVNVKPSPVVAAFSSRGPNTVTPQILKPDVIGPGVNILAAWSEAIGPTGLEKDTRRTKFNIMSGTSMSCPHISGLAALLKAAHPEWSPSAIKSALMTTAYVRDTTNSPLRDAEGGQLSTPWAHGSGHVDPHKALSPGLIYDITPEDYIKFLCSLDYELNHIQAIVKRPNVTCTKKFADPGQINYPSFSVLFGKSRVVRYTRAVINVGAAGSVYEVTVDAPPSVTVTVKPSKLVFKRVGERLRYTVTFVSKKGVNMMRKSAFGSISWNNAQNQVRSPVSYSWSQLLD

SEQ ID NO: 84 - protein, 556 aa, Nicotiana tabacum
MGTKFILFILLFIFLFSSGFVACGGFYSFRNLNSSVSGIEFPNHPSFNAVSSSADSDCNYGVSQKSKTHSIAQEVDGVDVKNGENEEVSIFGNQKKEAVKFQLRHRSAGKKIEAKDSVFESRARDLSRIQTLHTRIVEKKNQNYNSRLAKSNEKHVDKHKPVIAPAAVSLESYELSGKLMATLESGVSLGSGEYFMDVFVGTPPKHFSLILDTGSDLNWIQCVPCFDCFEQNGPHYNPQDSTSFRNISCHDPRCKFVTSPDPPQLCKSENQTCPYYYWYGDSSNTTGDFALETFTVNLTTTSGSEFRKVENVMFGCGHWNRGLFHGAAGLLGLGRGPLSFASQLQSLYGHSFSYCLVDRNSNSSVSSKLIFGEDKELLKHPQLNFTSLVGGKEVETFYYVQIKSVIVGGEVLNIPEETWNLSLEGLGGAIIDSGTTLSYFADPAYEIIKEAFVNKVKGYPIVQDFPILNPCYNVSGVKNLEFPSFGIVFGDGAVWNFPVENYFIKLEPEDIVCLAVLGTPRSALSIIGNYQQQNFHILYDTKRSRLGYAPTRCADA

SEQ ID NO: 85 - protein, 357 aa, Nicotiana tabacum
MALTLKSLATPLLFGALFILILQVVAEQPISEAKVESAILQESIIKEVNENAKAGWKAAFNPRFSNFTVSQFKRLLGVKPAREGDLEGIPILTHPKLLELPKEFDARKAWPQCSTIGRILDQGHCGSCWAFGAVESLSDRFCIHHNLNISLSVNDLLACCGFLCGSGCDGGYPITAWRYFIRRGVVTEECDPYFDNEGCSHPGCEPGYPTPKCQRKCVKEILLWGKSKHYGVNAYRIHHDPNSIMTEIYKNGPVEVSFTVYEDFAHYKSGVYKHVTGQSMGGHAVKLIGWGTSEQGEDYWLIANSWNRGWGDDGYFKIRRGTNECGIEHNVVAGLPSAKNLNVELDDVSNAFLDASM

SEQ ID NO: 86 - protein, 821 aa, Nicotiana tabacum
TLVLHTSFYLLLSVASPGDCLLLSIFPFSFSSPRYFPYKQNTVKIISSNFLFSPFFQMGSFLCFSVIVLFLVFQPCFSKKVYIVHMKNHQIPSSFATHHDWYNAQLQSLSSSSTSDESSLLYSYDTAYSGFAASLDPHEAELLRQSDDVVGVYEDTVYTLHTTRTPEFLGLNNELGLWAGHSPQELNNAAQDVVIGVLDTGVWPESKSFNDFGMPNVPSRWKGECESGPDFDPKVHCNKKLIGARFFSKGYQMSASGSFTNQPRQPESPRDQDGHGTHTSSTAAGAPVANASLLGYASGVARGMAPRARVATYKVCWPTGCFGSDILAGMERAILDGVDVLSLSLGGGSGPYYHDTIAIGAFSAMEKGIVVSCSAGNSGPAKASLANTAPWIMTVGAGTIDRDFPAFATLGNGKKITGVSLYSGKGMGKKVVPLVYSTDSSASLCLPGSLDPKIVRGKIVLCDRGTNARVEKGLVVKEAGGVGMILANTAESGEELVADSHLLPAVAVGRKLGDFIRQYVKSEKNPAAVLSFGGTVVNVKPSPVVAAFSSRGPNTVTPQILKPDVIGPGVNILAAWSEAIGPTGLEKDTRRTKFNIMSGTSMSCPHISGLAALLKAAHPEWSPSAIKSALMTTAYVHDTTNSPLRDAEGGQLSTPFAHGSGHVDPHKALSPGLIYDITPEDYIKFLCSLDYELNHIQAIVKRPNVTCAKKFADPGQINYPSFSVLFGKSRVVRYTRAVTNVAAAGSVYEVVVDAPPSVLVTVKPSKLVFKRVGERLRYTVTFVSNKGVNMMRKSAFGSISWNNAQNQVRSPVSYSWSQLLD

SEQ ID NO: 87 - protein, 438 aa, Nicotiana tabacum
MASSCLHAILLCFLLFITSTTAQNQTSFRPKGLILPITKDASTLQYLTQIHQRTPLVPVSLTLDLGGQFLWLDCDQGYVSSSYKPARCRSAQCSLAGAGSGCGQCFSPPKPGCNNNTCSLLPDNTITRTATSGELASDTVQVQSSNGKNPGRNVTDKDFLFVCGATFLLEGLASGVKGMAGLGRTIISLPSQFSAEFSFPRKFAVCLSSSTNSKGVVLFGDGPYSFLPNREFSNNDFSYTPLFINPVSTASAFSSGEPSSEYFIGVKSIKINQKVVPINTTLLSIDNQGVGGTKISTVNPYTILETSIYNAVTNFFVKELVNITRVASVAPFGACFDSRNIVSTRVGPAVPSIDLVLQNENVFWRIFGANSMVQVSENVLCLGFVDGGVNPRTSIVIGGYTIENNLLQFDLAGSRLGFTSSILSRLTTCANFNFTSIT

SEQ ID NO: 88 - protein, 909 aa, Nicotiana tabacum
MNPEKFTHKTNEALAGAHELALSAGHAQFTPLHMAVALISDHNGIFRQAIVNAGGNEEVANSVERVLNQAMKKLPSQTPAPDEIPPSTSLIKVLRRAQSSQKSCGDSHLAVDQLILGLLEDSQIGDLLKEAGVSASRVKSEVEKLRGKEGRKVESASGDTTFQALKTYGRDLVEQAGKLDPVIGRDEEIRRVVRILSRRTKNNPVLIGEPGVGKTAVVEGLAQRIVRGDVPSNLADVRLIALDMGALVAGAKYRGEFEERLKAVLKEVEEAEGKVILFIDEIHLVLGAGRTEGSMDAANLFKPMLARGQLRCIGATTLEEYRKYVEKDAAFERRFQQVYVAEPSVTDTISILRGLKERYEGHHGVKIQDRALVVAAQLSSRYITGRHLPDKAIDLVDEACANVRVQLDSQPEEIDNLERKRIQLEVELHALEKEKDKASKARLVEVRKELDDLRDKLQPLMMRYKKEKERIDELRRLKQKRDELIYALQEAERRYDLARAADLRYGAIQEVETAIANLESTSAESTMLTETVGPDQIAEVVSRWTGIPVSRLGQNEKEKLIGLGDRLHQRVVGQDHAVRAVAEAVLRSRAGLGRPQQPTGSFLFLGPTGVGKTELAKALAEQLFDDDKLMIRIDMSEYMEQHSVARLIGAPPGYVGHDEGGQLTEAVRRRPYSVVLFDEVEKAHPTVFNTLLQVLDDGRLTDGQGRTVDFTNTVIIMTSNLGAEYLLSGLMGKCTMETAREMVMQEVRKQFKPELLNRLDEIVVFDPLSHEQLRQVCRYQMKDVALRLAERGIALGVTEAALDVILSESYDPVYGARPIRRWLERKVVTELSKMLVKEEIDENSTVYIDAGVGRKDLTYRVEKNGGLVNAATGQKSDILIQLPNGPRSDAVQAVKKMRIEEIEEDEMED

SEQ ID NO: 89 - protein, 407 aa, Nicotiana tabacum
MQSFKSASILRRLLQNSRLVSHSRSFCSVSTNALVDESQSTVLVEGKASSRTAILNRPHALNALNFSVVDRLLKLYKNWEDDPDIGFVVLKGSGKAFSAGGDIVTIYNLLKQDAGNLQDCKDFCWTINNLVYVVGTLLKPHVALLNGITMGGGAGISIPGTFRVATEKTVFATPETLIGYHPDAGASFYLSHLPGYLGEYLALTGDKINGAEMISCGLATHYLHSAKLPLIEEQLGKLMTDDPSVIERSLENCGEIVHPDPTSVLHRIETLNKCFSHDTVEEIIDALESEAAKKQDAWCVSTLRKLQETAPLSLKVSLRSIREGRHQTLDQCLIREYRMSVQAFSGQITNDFCEGVRARLVDRDFAPKWDPPSLDKVTDDMVDQYFSRLTAFEPELELPTQQREAFT

SEQ ID NO: 90 - protein, 357 aa, Nicotiana tabacum
MALTLKSLATPLLLGAFFILVLQVVAEKPISEAKVESAILKESIIKEVNENAKAGWKAAFNPQFSNFTVSQFKRLLGVKPAREGDLEGIPLLTHPKLSELPKEFDARKAWPQCSTIGRILDQGHCGSCWAFGAVESLSDRFCIHHNLNISLSVNDLLACCGFLCGSGCDGGYPISAWRYFIRRGVVTEECDPYFDNEGCSHPGCEPGYPTPKCQRKCVKENLLWGKSKHYGVNAYRIHRDPYSIMTEIYKNGPVEVSFTVYEDFAHYKSGVYKHVTGQSMGGHAVKLIGWGTSEQGEDYWLIANSWNRGWGDDGYFKIRRGTNECGIEHNVVAGLPSAKNLNVELDDVSDAFLDASM

SEQ ID NO: 91 - protein, 760 aa, Nicotiana tabacum
MGVLKKTLLLLFLCVFLGDISLCFSSKLYVVYMGSKDSDEHPDEILRQNHQMLTAIHKGSIEQAKTSHVYSYRHGFKGFAAKLTEAQASEISKMPGVVSVFPNTKRSLHTTHSWDFMGLSDDETMEIPGFSTKNQINVIIGFIDTGIWPESPSFSDTNMPPVPAGWKGQCQSGEAFNASICNRKIIGARYYMSGYEAEEENGKTMFYKSARDSSGHGSHTASTAAGRYVANMNYKGLANGGARGGAPMARIAVYKTCWSSGCYDVDLLAAFDDAIRDGVHVISLSLGPDAPQGDYFNDAISVGSYHAVSRGILVVASVGNEGSTGSATNLAPWMITVAASSTDRDFTSDILLGNGVRLKGESLSLSQMNTSTRIIPASEAYAGYFTPYQSSYCLDSSLNRTKAKGKVLVCLHAGSSSESKMEKSIIVKEAGGVGMILIDDADKGVAIPFVIPAATVGKKIGNKILAYINNTRLPMARILSARTVLGAQPAPRVAAFSSRGPNSVTPEILKPDIAAPGLNILAAWSPAASTKLNFNVLSGTSMACPHITGVVALLKAVHPSWSPSAIKSAIMTTAKLSDKHHKPIIVDPEGKRATPFDFGSGFVNPTNVLDPGLIYDAQPADYRAFLCSIGYDEKSLHLITRDNSTCDQTFASPNGLNYPSITIPNLRSTYSVTRTVTNVGKARSIYKAVVYAPTGVNVTVVPRRLAFTRYYQKMNFTVNFKVAAPTQGYVFGSLTWRNKRTSVTSPLVVRVAHSNMGMMV

SEQ ID NO: 92 - protein, 510 aa, Nicotiana tabacum
MGAKAFLVAMFLSALLFPFASSSNDGLMRIGLKKMKFDQNNRLAARIESKEGDVLRGSIRKYNFRGKLGDFEDTDIVALKNYMDAQYFGEIGVGTPPQKFTVIFDTGSSNLWVPSSKCYFSVPCFFHSKYKSSESSTYKKNGKSAAIQYGSGAISGFFSQDNVKVGDLVVTDQEFIEATREPSVTFLVAKFDGILGLGFQEISVGNAVPVWYNMVKQGLIKDPVFSFWLNRNTEEEQGGEIVFGGVDPNHYKGEITYVPVTQKGYWQFDMGDVLIDGKATGYCESGCSAIADSGTSLLAGPTAIITMINQAIGASGVASQQCKSVVEQYGQTIMDLLLAEAHPKKICSQVGVCTFDGNRGVSMGIDSVVDEKAGRSTGLQDGMCSACEMAVIWMANQLRQNQTQDRILNYVNELCERLPSPLGESAVDCGKLSSMPKVSFTIGGKVFDLSPNEYILKVGEGAKAQCISGFTGLDIPPPRGPLWILGDIFMGRYHTVFDYGKLRVGFAEAA

SEQ ID NO: 93 - protein, 468 aa, Nicotiana tabacum
MTFFRSFLFFLLTLFVISSALDMSIISYDEQHGQMGTTHHRTDDEVRELYESWLVKHGKNYNAIGEKERRFEIFNDNLRFIDEHNAENRSYKLGLNRFSDLTNEEYRAMFVGGRLDRKTRLMKSPKSNRYAFQAGEKLPESVDWREKGAVAPVKDQGQCGSCWAFSTVGAVEGINKIVTGELISLSEQELVDCDRSYNQGCNGGLMDYAFDFIKNNGGIDTEDDYPYHAQDGTCDPYRKNARVVSIEGYEDVPENDEKSLMKAVANQPVSVAIEGGGRAFQHYSSGVFTGYCGTQLDHGVVVVGYGTENGEDYWIVRNSWGANWGESGYIKLQRNFANSTTGKCGIAMQASYPLKSGANPPNPGPSPPTPVTPSTVCDEYYSCPQGTTCCCIYQYGEYCFGWGCCPYESATCCDDNYSCCPHDYPVCDVDAGTCLMSKDNPLKVKALKRGPARVNWSGMKSNRKVSYV

SEQ ID NO: 94 - protein, 539 aa, Nicotiana tabacum
MANSYTSFNFFLAPIIFLAILGLQLQSSDGFGTFGFDIHHRYSDPVKGILDLHGLPEKGSVEYYSAWTQRDRFIKGRRLADTTNPTPLSFSGGNETFRLSSLGFLHYANVTVGTPGLSFLVALDTGSDLFWLPCDCSNCVRALETRSGRRINLNIYSPNTSSTGQIVPCNGTLCGQRRRCLSSQNACAYGVAYLSNNTSSSGVLVEDILHLETDNAQQKSVEAPIALGCGIRQTGAFLSGAAPNGLFGLGLESISVPSMLASKGLAANSFSMCFGPDGIGRIVFGDKGSPDQGETPLNLDQLHPTYNISLTGITVGNKITDVDFTAIFDSGTSFTYLNDPAYKVITENFDSQAKQLRIQPDGEIPFEYCYGLSANQTTFEVPDLNLTMKGGNQFFLFDPIIMLSLQDGSRAFCLAVVKSGDVNIIGQNFMTGYRVVFDREKMVLGWKPSDCYDSRESNDKSTTLPVNKRNSTEAPSPSSVVPEATKGNGSGNEPATSFPSVPSSRPAINHAPAHFNSYICQLMMALFSLFSYYLIIVSS

SEQ ID NO: 95 - protein, 548 aa, Nicotiana tabacum
MVTKFSIFILVVLLRLFSFGSVASREIHNSGLNLNSSASGIEFPQHPSFNSVTASGNSDCSYGTSKKSTTTHVITQEENRSDEKEDEDLMVSKNQPREAVKFHLRHRSAGQNIEAKDSIFESTTRDLGRIQTLHTRIVEKKNQNSISRQTKNSEKPTQSSSFEFSGKLMATLESGVSHGSGEYFMDVFVGTPPKHFSLILDTGSDLNWIQSVPCYDCFEQNGPHYDPKDSISFKNISCHDPRCHLVSSPDPPQPCKSENQTCPYYYWYGDSSNTTGDFALETFTVNLTTPSGDSEIKKVENVMFGCGHWNRGLFHGAAGLLGLGRGPLSFSSQLQSLYGHSFSYCLVNRNSNSSVSSKLIFGEDKELLKHANLNFTSLVGGKENHLETFYYVQIKSVIAGGEVLNIPEETWNLSTEGVGGTIIDSGTTLSYFAEPAYEIIKQAFVNKVKHYPVLEDFPILKPCYNVSGVEKLELPSFGIVFGDGAIWNFPVENYFIKLEPEDIVCLAMLGTPHSAMSIIGNYQQQNFHILYDTKRSRLGFAPTRCADA

SEQ ID NO: 96 - protein, 505 aa, Nicotiana tabacum
MPSSFSLLFLTLLLASISLSFSSTLNSNDDDFFLSSTPKFPLTMAEKLIRQLNLFPKHDINKAAATGDSAAVTEQRLFEKKLNLSYVGNSGSTVQDLGHHAGYYRLPHTKDARMFYFFFESRSRKNDPVVIWLTGGPGCSSELAVFYENGPFKIADNMSLVWNDFGWDKVSNLIYVDQPTGTGFSYSSNDDDIRHDERGVSNDLYDFLQAFFKAHPQYAKNDFYITGESYAGHYIPAFASRVHQGNKNKEGIYVNLKGFAIGNGLTDPEIQYKAYTDYALDMKLIKKSDYNAIEKSYPKCQLAIKLCGKDGGTACMAAYLVCTSIFNKIMDIAGDKNYYDVRKRCEGDLCYDFSKMETFLNDQQVKKALGVGDIEFVSCSSEVYQAMQLDWMRNLELGIPSLLEDGIKLLVYAGEYDLICNWLGNSRWVHAMKWTGQKAFGKATQVSFAVDGVEKGVQKNYGPLTFLKVHDAGHMVPMDQPKAAMEMLQRWMQDKLSKEGHLAPM

SEQ ID NO: 97 - protein, 214 aa, Nicotiana tabacum
MTLTLKSLAAPLFLGAFCILILQVVAEKPISEAKVESAILQESIIKEVNENAKAGWKAAFNPRFSNFTVSQFKRLLGVKPAREGDLEGIPILTHPKLLELPKEFDARKAWPQCSTIGRILDQGHCGSCWAFGAVESLSDRFCIHHNLNISLSVNDLLACCGFLRGSGCDGGYPISAWRYFIRRGVVTEECDPYFDNEGFHTRVVNQDIPPQSVV

SEQ ID NO: 98 - protein, 553 aa, Nicotiana tabacum
MFRLVMVTKFSIFILVVLLRLFSFGFVASREIHNFGINLNFSASGIEFPQHPSFNSVTASGNSDCSYGTSKKSTTTHVITQEENNSDEKEDEDLMVSENQPREAVKFHLRHRSAGQNIEAKDSIFESTTRDLGRIQTLHTRIVEKKNQNFISRQTKNSEKTTQSSSFEFSGKLMATLESGVSHGSGEYFMDVFVGTPPKHFSLILDTGSDLNWIQSVPCYDCFEQNGPHYDPKDSISFKNISCDDPRCHLVSSPDPPQPCKSENQTCPYYYWYGDSSNTTGDFALETFTVNLTTPNGDSEIKKVENVMFGCGHWNRGLFHGAAGLLGLGRGPLSFSSQLQSLYGHSFSYCLVNRNSNSSVSSKLIFGEDKELLKHLNLNFTSLVGGKENHLETFYYVQIKSVIVGGEVLNIPEETWNLSTEGVGGTIIDSGTTLSYFAEPAYEIIKQAFVNKVKRYPILDDFPILKPCYNVSGVEKLELPSFGIVFGDGAIWTFPVENYFIKLEPEDIVCLAILGTPHSAMSIIGNYQQQNFHILYDTKRSRLGFAPRRCADA

SEQ ID NO: 99 - protein, 474 aa, Nicotiana tabacum
MSGFRLPLLFHLLLPLTLFLQYVQSLPQNSSTVEFLPGFDGPLPFYLETGYIGVGKSEEVQLFYYFVKSESNPKKDPLLLWLTGGPGCSSFTGVAYEVGPLAFGQKAYNGSLPILVSTPYSWTKFASILFLEQPVNTGFSYATTSAASKCTDLQACDQVYEFLLKWFNNHPEFISNPFYVSGDSYSGITVPVIVQLISDGIEAGKKPLINLKGYSLGNPLTFPEESNYQIPFCHGMGLISNELYESLKETCKGDCRNIDPTNKLCLENFKMFKKLVSSINDQQILEPFCGTDSESPNPRQLSGERRSLEEDFIFLKHDDFICRESRVATRKLSNHWANDPSVQEALHVRKGTIRRAWARCRQSIMGTTYRVTFMNSIPYHVNLSSKGYRSLIYSGDHDMVVPFQSTQAWIKYLNYSIIDDWRPWTIDGQVAGYTRSFSNHMTYATVKGGGHTAPEYKREESFHMFKRWIAQQPL

SEQ ID NO: 100 - protein, 246 aa, Nicotiana tabacum
METNGLIKEILPRDAVNNMTRLILSNALYFKGEWNEKFDVSETKDHDFHLLNGGSIQAPFMTSKKKQYIAAFDCFKILRLPYKQGTDTRRFCMYFILPDAHDGLPALLEKISLEPGFLNNHVPYGKVRARKFLIPKFKITFGFEASNILKGLGLTLPFCGGSLTEMVDSPMPQNLSVSQVFHKSFIEVNEEGTEAAAVTATVIMTMSLIIEKEMDFVADHPFLFLIRDESTGAVLFIGSVMNPLAG

SEQ ID NO: 101 - protein, 233 aa, Nicotiana tabacum
MNESYGNSRASSSSTTSSLNSSSHGTEDDHTIARILAEEEENALKYGGNKLGRRLSHLDSIPHTPRVIGEIPDPNDATLDHGRLSSRLATYGLAEMQIEGDGNCQFRALSDQLYHNPEYHKHVRKEVVKQLKRFRKLYEGYVPMRYKSYLRKMKRLGEWGDHVTLQAAADRFGVKICLVTSFRDNGYIDILPKDIQPSRELWLSFWSEVHYNSLYEIGEVPARVRRKKHWLFF

SEQ ID NO: 102 - protein, 439 aa, Nicotiana tabacum
MSWLCPSLVLVLLIFQGPICTCSSISDLFESWCQQNGKTYSSEQERVYRLEVFEENYAYIIEHNSKGNSTYTLNLNAFSDLTHHEFKNSFLGLSSSANDFIRLKTGSSSAGVFNDVGVVDIPSSLDWREKGAVTKVKNQGSCGACWSFSATGAIEGINKIVTGSLVSLSEQELIDCDKSYNDGCGGGLMDYAFEFVKKNGGIDTEEDYPFNEREGTCNKNKLQRRVVTIDGYTDVPQYDEDKLLKAVANQPVSVGICGSERAFQSYSKGIFTGPCSTVLDHAVLIVGYGSENGVDYWIIKNSWGTSWGINGYMHMQRNSGNQEGICGINKLASYPTKSSPNPPSPPSPGPSKCSMFTSCGQGETCCCGWRLLGVCVSWKCCGLDSAVCCKDGRHCCPHDYPICDTSRNLCLKRMSNATIVQQPQKEAFSGKFGGLIYPF

SEQ ID NO: 103 - protein, 339 aa, Nicotiana tabacum
MCEPESEAARGVLSFLDVDQLFSSNYYGDGRKHDVEICHEQYARENHYHTSYCNVDNDEAIAHVLQEDLSELSIAEDAESSHADEQYLQASTGVQHWHTPPREYYAGHDTSLEADDVGPSSSCSSPGDRSYDGEEYTYTLEIQDEFELDGEVGKRINQLSAVPHVPRINGDIPSVDEATSDHQRLLNRLQLFDLVEHKVQGDGNCQFRALSDQFYRTPEHHKFVRQQVVSQFQHHPEMYEGYVPMEYGEYLTRMSKSGEWGDHVTLQAAADSYGVKILVITSFKDTCYIEILPKNQKSNRVIYLSFWAEVHYNSIYPQGDFLPFDFKKKKKKWSFWNKH

SEQ ID NO: 104 - protein, 420 aa, Nicotiana tabacum
MPSLLQIFLPLFPFFFLVSFSVSHGPFLPKAIILPVNKDLSTFQYVTQVYMGAHLVPTNLVVDLGGSFLWTNCGLTSVSSSQKLVPCNSLKCSMAKPNGCTNKICGVQSENPFTKVAATGELAEDMFAVEFIDELKTGSIASIHEFLFSCASTTLLQGLARGAKGMLGLGNSRIALPSQLSDTFGFQRKFALCLSSSNGAIISGESPYLSLLGHDVSRSMLYTPLISSKDGVSEEYYINVKSIKINGKKLSLNTSLFAMDEGVGGTKISTIPPFTTMKSSIYKSFIEAYEKFAISMELNKVEAIAPFELCFSTKGIDVTKVGPNVPTTDLVLQSEMVKWRIYGRNSMVKVSDEVMCLGFLNGGVNQKASIVIGGYQLEDNLLEFNLGTSMLGFTSSLSMAETSCSDFMFHSVSKDSAFDS

SEQ ID NO: 105 - protein, 443 aa, Nicotiana tabacum
MGAKEVLILVLVCMFIVFPSCHGDDECLNPFLVDQNCYVKDYITKLANATETVKWMMKIRRQIHENPELAYEEFKTSGLIREELDRMGVKYRWPVAKTGVVATIGSGKPPFVALRADMDALPIQELAKWEHKSKVDGKMHACAHDAHTAMLLGAAKILQQLRHNLQGTVVLIFQPAEERGHGAKDMIEEGVLENVEAIFGMHLVHKYESGVVASRPGEFLAGCGSFKATIRGKGGHAAVPHDSVDPILAASTSVISLQSIVSRETDPLESQVVSVAMIEGGHAFNIIPELATISGTYRAFSKKSFYGLRKRIEEVIRAQAAVHRCTVEIDFDGRENPTLPPTINDERIYEHARKVSKMIVGEESFKIAPSFMGSEDFAVFLEKVPGSFFLLGTKNEKIGAIYPPHNPHFIIDEDVLPIGAAIHATFAYSYLLNSTNKFTSHSS

SEQ ID NO: 106 - protein, 354 aa, Nicotiana tabacum
MKLNPYSWTKVASIIFLDLPVGTGFSYARTPTALQSSDLQASDQAYEFLYKWFLDHPEFLKNPLYVGGDSYSGMVVPIITQIIATKNEMGIKPFVDLQGYLLGNPSTFKGEKNYEIPFAYGMGLISDELYESLTRNCKGEYQNTDPSNTQCLQDVHTFQELLKRINNPHILEPKCQFASPKPHLLFGQRRSLNVKFHQLNNPQQLPALKCRNDWYKLSSHWADDGQVREALHIRKGTIGKWVRCASLQYQKTIMSSIPYHANLSAKGYRSLIYSGDHDKVVTFLSTQAWIKSLNYSIVDDWRPWIVDNQVAGYTRSYSNRMTFATVKGAGHTAPEYKPRECLAMLKRLMSYKPL

SEQ ID NO: 107 - protein, 339 aa, Nicotiana tabacum
MCEPESEATRGVLSFLDVDQLFSSNYYGDGRKHDVEICHEQYARENQYHTSYCNVDSDEAIAHLLQEELSELSIAEDAESSHADEQYFQASTGVQHWHTPPREYYAGHDTGLEADDVGPSSSCSSPGDRSYDGEEYTYTLEIQDEFELDGEVGKRINQLSAVPHVPRINGDIPSVDEATSDHQRLLDRLQLFDLVEHKVQGDGNCQFRALSDQFYRTPEHHKFVRQQVVSQLKHHPEMYEGYVPMEYGEYLKRMSKSGEWGDHVTLQAAADSYGVKILVITSFKDTCYIEILPKNQKSNRVIYLSFWAEVHYNSIYPQGDFLPFDLKKKKKKWSFWNKH

SEQ ID NO: 108 - protein, 421 aa, Nicotiana tabacum
MPSLLQIFLPLFPFFFFVSFSVSHGPFLPKAIILPVNKDLSTFQYVTQVYMGAHLVPTNLVVDLGGSFLWTNCGLTSVSSSQKLVPCNSLKCSMAKPNGCTNKICGVQSENPFTKVAATGELAEDMFAVEFIDELKTGSIASIHEFLFSCASTTLLQGLARGAKGMLGLGNSRIALPSQLSDTFGFQRKFALCLSSSNGAIISGESPYLSLLGHDVSRSMLYTPLISSKNGVSEEYYINVKSIKINGNKLSLNISLFTMDEEGVGGTKISTISPFTSMKSSIYRTFMEAYEKIAISVNLTKVESIAPFELCFSTEGIDVTKVGPNVPTMDLVLQSEMVKWRIYGRNSMVKVSDEVMCWGFLDGGVNQKASIVIGGYQLENNLLEFNLGTSMLGFTSSLSTAETSCSDFMIHSVSKDSAFDS

SEQ ID NO: 109 - protein, 674 aa, Nicotiana tabacum
MKMSPALSLSVIQFPLCKSQDLSKDTNNPKIFSKETPCQKSYSDTRINRRKLLSGSGLSLVAGTLAKPARAETEAPIEATSSRMSYSRFLEYLNEGAVKKVDFFESSAVAEIFNPALNKVQRVKVQLPGLPPELVRKLREKDVDFAAHLPEMNVIGPLLDLLGNLAFPLILLGSLLLRTSSSNTPGGPNLPFGLGRSKAKFQMEPNTGVTFDDVAGVDDAKQDFQEIVEFLKTPEKFAAVGAKIPKGVLLVGPPGTGKTLLAKAIAGEAEVPFLSLSGSEFVEMFVGVGASRVRDLFNKAKENSPCLVFIDEIDAVGRQRGTGIGGGNDEREQTLNQLLTEMDGFTGNTGVIVIAATNRPEILDQALLRPGRFDRQVSVGLPDIRGREEILKVHSNNKKLDKDVSLSVIAMRTPGFSGADLANLMNEAAILAGRRGKDKITSKEIDDSIDRIVAGMEGTKMTDGKNKILVAYHEVGHGVCATLTPGHDAVQKVTLIPRGQARGLTWFIPGEDPTLISKQQLFARIVGSLGGRAAEEIIFGEAEITTGAAGDLQQITQIARQMVTMFGMSEIGPWALTDPATQSGDVVLRMLARNQMSEKLAEDIDASVRHIIERAYEIAKNHIRNNREAIDKLVDVLLEKETLTGDEFRAILSEFTNIPSANINSKPIRELIEA

SEQ ID NO: 110 - protein, 186 aa, Nicotiana tabacum
MEGLHQLKTGELIPLSEQELVDCDVEGEDEGCSGGLLDTAFDFILKNKGLTTEVNYPYKGEDGVCNKKKSALSAAKITGYEDVPANSEKALLQAVANQPVSVAIDGSSFDFQFYSSGVFSGSCSTWLNHAVTAVGYGATTDGTKYWIIKNSWGSKWGDSGYMRIKRDVHEKEGLCGLAMDASYPTA

SEQ ID NO: 111 - protein, 503 aa, Nicotiana tabacum
MGCRMKFLNVVLVVAAVMAAAAAVAFGAEKLPAGVLSLERIFPLNGKMELEEVRARDRARHARMLQSFAGGIVNFPVVGSSDPYLVGLYFTKVRLGTPPREYNVQIDTGSDILWVTCSSCDDCPRTSGLGVELNFYDATISSTASPISCADQVCASIVQTASAECSTETNQCGYSFQYGDGSGTTGHYVADLLYFDTVLGTSLIANSSAPIIFGCSTSQSGDLTKTDRAIDGIFGFGQQGLSVISQLSSHRITPKVFSHCLKGEGNGGGILVLGEILDPRIVYSPLVPSQAHYNVYLQSIAVNGQLVPVDPSVFATSGNRGTIVDSGTTLAYIATEAYDPFVNAITAAVSPSVRPIISRGKPCFLVSSSIAEIFPPVSLNFDGGASMALRPSDYLVHMGFVEGAAMWCIGFEKQDQGVTILGDLVLKDKIFVYDLARQRIGWADYDCSSSVNVSITSGKDEFINAGQLSVNRASGSLLFNPRHTRTIFHLLSLVLMIGSPFLT

SEQ ID NO: 112 - protein, 361 aa, Nicotiana tabacum
MTRASIILLLLLIATSIAAAQGGALTFDDDNPIRQVVVSDGLQELENGILQLIGQTRRALSFVRFVRRYGKRYDSVEEIKQRFEIYLDNLKMIRSHNKQRLSYKLGVNEFTDLTWDEFRRERLGAPQNCSATTKSDLQLTNVNLPETKDWREAGIVSPVKKQGKCGSCWTFSTTGALEAAYAQAFGKNISLSEQQLLDCAGAFNNFGCHGGLPSQAFEYIKYSGGLDTEEEYPYAGKAGVCKFSSENVAVKVVDSVNITKGAEDELKYAIAFIRPVSVAYQVVKGFKQYKGGIYSSTVCGNTPQDVNHAVLAVGYGVDNGTPYWLIKNSWGAEWGDNGYFKMEMGKNMCGIATCASYPIVA

SEQ ID NO: 113 - protein, 905 aa, Nicotiana tabacum
MNPEKFTHKTNEALAEAHELAISAGHAQFTPLHMALALISDHNGIFRQAIVNAAGSEETANSVERVFKQAMKKIPSQTPAPDQIPPSTSLIKVLRRAQSLQKSRRDTHLAVDQLILGLLEDSQIGDLLKEAGIGAARVKSEVEKLRGKDGKKVESASGDTNFQALKTYGRDLVEQAGKLDPVIGRDEEIRRVIRILSRRTKNNPVLIGEPGVGKTAVVEGLAQRIVRGDVPSNLSDVRLIALDMGALIAGAKYRGEFEERLKAVLKEVEEAEGKVILFIDEIHLVLGAGRTEGSMDAANLFKPMLARGQLRCIGATTLEEYRKYVEKDAAFERRFQQVYVAEPSVPDTISILRGLKEKYEGHHGVKIQDRALVVAAQLSARYITGRHLPDKAIDLVDEACANVRVQLDSQPEEIDNLERKRIQLEVELHALEKEKDKASKARLVEVRKELDDLRDKLQPLTMRYKKEKERIDELRRLKQKRDELTYALQEAERRYDLARAADLRYGAIQEVEAAIANLESSTDESTMLTETVGPDQIAEVVSRWTGIPVSRLGQNEKDKLIGLANRLHQRVVGQDDAVRAVAEAVLRSRAGLGRPQQPTGSFLFLGPTGVGKTELAKALAEQLFDDDKLMVRIDMSEYMEQHSVARLIGAPPGYVGHEEGGQLTEAVRRRPYSVVLFDEVEKAHPTVFNTLLQVLDDGRLTDGQGRTVDFTNTVIIMTSNLGAEYLLSGLMGKCTMEKARDMVMQEVRKQFKPELLNRLDEIVVFDPLSHEQLRQVCRHQLKDVASRLAERGIALGVTEAALDVILAQSYDPVYGARPIRRWLEKKVVTELSKMLVKEEIDENSTVYVDAASSGKDLSYRVEKNGGLVNAATGKKSDILIQLPNGVRSDAAQAVKKMKIEEIVDE

SEQ ID NO: 114 - protein, 433 aa, Nicotiana tabacum
MPEAPKKSFFTLSLVPFLPVYTLIRFNPPIESEPLISSSSDECQHDQKQQSDSRNYIVRFYHYKEPEDHWNYLQNNLKFKGWQWIERKNPAARFPTDFGLVEIDESMKELLLEKFRKMNLVKDVSLDLSYQRIVLEEKSEKNGAFANGKKRPGKIFTAMSFSEGQNYAVANTSIMRISWSRHLLMQKSRVTSLFGAHELWSKGHTGAKVKMAIFDTGIRADHPHFRNIKERTNWTNEDTLNDNVGHGTFVAGVIAGQDEECLGFAPDAEIYAFHVFTDAQVSYTSWFLDAFNYAIATNMDVLNLSIGGPDYLDLPFVEKVWELTANNIIMVSAIGNDGPLYGTLNNPADQSDVIGVGAIDQSNHLASFSSRGMSTWEIPHGYGRVKPDIVAYGREIMGSKISTRCKRLSGTSVASPVVTGIVCLLVSIIPESK

SEQ ID NO: 115 - protein, 504 aa, Nicotiana tabacum
MAQMKLSLSLFLSLVLLLAFSPSSFAKVSISSKLASKQAEKLIHELNLFPKESDNIVDRDPFPTAASRIVEKRFNFANLTNSSVISFEDLGHHAGYYKIKHSHAARLFYFFFESRGSKDDPVVIWLSGGPGCSSELALFYENGPFSISNNLSLVRNEYGWDKVSNLIYVDQPTGTGFSYSSDRHDIRHSEAGVSDDLYDFLQAFFEEHPELVKNDFYITGESYAGHYIPAFAARVHKGNKAKEGIHINLKGFAIGNGLTDPKIQYAAYTDYALDMGLISKSDHDRINKILPVCEVAINLCGTDGKISCLAAYFVCNSIFSAVRARAGADINHYDIRKKCVGALCYDFSNMEKLLNMHSVKQALGVEDIEFVSCSTTVYQAMLVDWMRNLEAGIPTLLEDGIKLLVYAGEYDLICNWLGNSRWVQAMEWSGQKEFVASPDVPFEVDSSEAGLLKSHGPLSFLKVHDAGHMVPMDQPKVALEMLKRWIGGTLSQQTTETEDLVASI

SEQ ID NO: 116 - protein, 473 aa, Nicotiana tabacum
MAIHTSTLSISILVMLMFSAVTSSAEDMSIISYNEKHHTNGESTVWRTDDEIVSLYESWLVEHKKVYNALGEKDKRFQIFKDNLRYIDEQNSAPEKSYKLGLTQFADLTNEEYKSIYLGTKPDGRSRLSYTQSDRYAPKVGDSLPDSVDWRKKGVLVDVKNQGQCGSCWAFSAVASIEAVNKIMTGNLISLSEQELVDCDTADNQGCQGGLMDDAFKFVIQNGGIDTEEDYPYKAKDGKCDQARKNAKVVTIDGYEDVPANDEKALKKAVAGQPVSVAIEAGGKDFQHYKSGIFTGKCGAAVDHGVVAVGYGSENGMDYWIVRNSWGASWGENGYLRMQRNIGNPKGLCGIATIASYPVKTGQNPPKPAPSPPSPVKPPTQCDDYNECPAGTTCCCVYKYYNYCFAWGCCPMEGATCCKDHNSCCPHDYPVCNVKAGTCSISKNNPLGVKAMQHILAKPIGTFGNEGKKTPSS

SEQ ID NO: 117 - protein, 530 aa, Nicotiana tabacum
MACNRLHTELGNWQVNPPSGFNLEPSDYLQRWLIEVNGAPGTLYANETYQLQAEFPEHYPIKAPQVIFLPPAPLHPDIYRDGHICLDILYDSWSPTMTVSSICISILSMLSSSTVKFPSSEMMDVPLILSKHVFFSKFKADEDESNNANMVFSPVSIQIIFALIAAGSSGSTLDQLLAFLKFNSVEELNSVYSRVITDVLADGSPMGGPRLSVTNWAWVDQSLSFKHSFKQVMDNVYKAASASVDFRNKGDEVTGEVNKWAEEKTNGLIKQILPPVAVNSGTSLILANALYFKGAWTEKLNASDTKDHEFHLLNGGSVQAPLMTSKKRQYVKAFDGFQVLRLRYKQGEDKRFLNMYVYLPNARDGLPTLLEKISSEPGFLDRHVPYEKVKVHEFLIPKFKISLGIEALEVLKGLELTLPFKGGLTEMVGENYPLAVANVFHKAFIEVNEEGAEAPAAKAFHKAFIEVNEEAPVAPAVTVATMMFGCSMMKVEEEIDFVADHPFMFLVKDETAGVVLFVGTLLNPLAVSPS

SEQ ID NO: 118 - protein, 549 aa, Nicotiana tabacum
LKVGSFFSSLIYSCNKASPNFYSYSFSLLSCFIELVNMGAKAFLVTILLSSLLFPLALSTSNDGLVRIGLKKIKFDQNNRLAARVESKEGEAVRASIRKYNNFHGNLGASEDTDIVALKNYMDAQYFGEIGIGSPPQKFTVIFDTGSSNLWVPSSKCYFSVPCFFHSKYKSSQSSTYKKNGKSAAIRYGTGAISGFFSQDSVKVGDLIVQNQEFIEATREPSVTFLVAKFDGILGLGFQEISVGNAVPVWYNMVKQGLVKEPVFSFWLNRNTKEDEGGEIVFGGVDPNHYKGKHTYVPVTRKGYWQFDMGDVLIDGQATGYCDNGCSAIADSGTSLLAGPTTVITMINHAIGASGVVSQQCKAVVEQYGQTIMDMLLAEAHPKKICSQVGLCTFDGTRGISMGIESVVDENAGKSSGLHDAMCSACEMAVVWMQNQLRQNQTQERILNYVNELCERLPSPMGQSAVDCGKLSGMPSVSFTIGGRTFDLSPEEYILKVGEGPAAQCISGFIALDVPPPRGPLWILGDVFMGRYHTVFDFGKLRVGFAEAA

SEQ ID NO: 119 - protein, 624 aa, Nicotiana tabacum
MSKQNLEAPLLDPSPATFNRRKKWSFALCFLFALTAISFIGLRHHGHVGIWLIGDVERYNGKLQQNADVVESEQAVVAADDGRCSEIGISMLKIGGHAVDAAVATALCLGVVNPMASGLGGGGFMVVRSSSTSEVQAIDMRETAPLAASQNMYDNNGKSKLEGALSMGVPGELAGLHAAWSKHGRLPWKTLFQPAIKLARDGFVVAPYLAHHIASKAKLILKDPGLRQVIAPEGKLLRAGDICHNVKLSHSLELIAEQGPEAFYNGEVGEKLVEDVKKAGGILTMDDLRNYKVETPEAVTVNAMGYTIVGMPPPSSGTLGISLILKILESYNAAEGSLGLHRLIEAMKHMFAFRMDLGDPDFVNISKTVSDMLSPSFAKAIRQKIFDNTTFPPEYYMPRWSQLRDHGTSHFCIVDSDRNAVSVTTTVNYPFGAGVLSPSTGIVLNDEMGDFSTPSEISPDELPPAPANFIQPKKRPLSSMAPIIVLKDNQLAGVIGGSGGMKIIPAVVQVFINHFILGMDPLAAVQSPRVYHELIPNVVLYENWTCIDGDHIELSDEKKHFLEERGHQLEAHNGGAICQLIVQNLPNSHLKLGRRSGKEYKNGVFHGMLVAVSDPRKDGRPAAI

SEQ ID NO: 120 - protein, 772 aa, Nicotiana tabacum
MLKKISSFNILLNMASHITLCIWLLFFFISIISLAKPETYIIHMDLSAMPKAFASHHNWYLTTLASLSDSSTNHKEFLSSKLVYAYTNAINGFSASLSPSEFEAIKNSPGYVSSIKDMSVKIDTTHTSQFLGLNSESGVWPTSDYGKDIIIGLVDTGIWPESKSYSDYGISEVPSRWKGECESGIEFNSSLCNKKIIGARYFNKGLLANNPNLNISMNSARDTDGHGTHTSSTAAGSYVEGASYFGYATGTAIGIAPKAHVAMYKALWEEGVYLSDVLAAIDQAITDGVDVLSLSLGIDAIPLHEDPVAIAAFAALEKGIFVSTSAGNEGPYYETLHNGTPWVLTVAAGTVDREFIGALTLGNGVSVTGLSLYPGNSSSSESSIVYVECQDDKELQKSAHNIVVCLDKNDSVSEHVYNVRNSKVAGAVFITNITDLEFYLQSEFPAVFLNLQEGDKVLEYIKSNSAPKGKLEFRVTHIGAKPAPKVATYSSRGPSPSCPSILKPDLMAPGALILASWPQQSPVTDVTSGKLFSNFNIISGTSMSCPHASGVAALLKAAHPEWSPAAIRSAMMTTSNAMDNTQSPIRDIGSKNAAATPLAMGAGHIDPNKALDPGLIYDATPQDYVNLLCALNFTSKQIKTITRSSSYTCSNPSLDLNYPSFIGFFNGNSSESDPRRIQEFQRTVTNIGDGMSVYTAKLTTMGKFKVNLVPEKLVFKEKYEKLSYKLRIEGPLVMDDIVVYGSLSWVETEGKYVVRSPIVATSIKVDPLTGHN

SEQ ID NO: 121 - protein, 434 aa, Nicotiana tabacum
MEFYQKLATCSHLSLLCFILLHSIQVQGSYFDQEYGKQVLSSAIQDKDWLVSIRRIIHEYPELRFQEYNTSALIRTELDKLGIYYEYPFAKTGLVALIGSSSPPVVALRADMDALPLQELVEWEHKSKVTGKMHGCGHDAHTAMLLGAAKLLNERKDKLNGTVRLVFQPAEEGGAGAYHMINEGALGDAEAIFGMHVDFKRPTGSIGTSPGPILAAVSFFEAKIEGKGGHAAEPHATVDPILAASFAVVALQQLISREVDPLHSQVLSVTYVRGGSASNVIPPYVEFGGTLRSLTTEGLLQLQKRVKEVIEGQAAVHRCKAYIDMKEEDFPAYPACINDERLHQHVGRVGKLLLGSENIKETEKVMAGEDFAFYQELIPGVMFQIGIRNEKLGSTHAPHSPHFFLDEDVLPIGAALHTAIAEMYLNDYQHPIAV

SEQ ID NO: 122 - protein, 327 aa, Nicotiana tabacum
RHYIYGKLTSNMKTFGIPLAAHSRVLTGSYIRSLYLQILTPFLVHTTAQADNLNCDRSATLNCDRSATEVCTDSEVSTDMEPGNSIVNGVPESIAEEDTAEPLDMDFEFYLSDDKATFKGSEIVMNEPLQSTDISGRLNVLVSWSPKMLEQYNTGLFSSLPEVFKSGFFAKRPQESVSLYKCLEAFLKEEPLGPEDMWYCPACKQHRQATKKLDLWRLPEILVIHLKRFSYNRFLKNKLETYVDFPTHDLDLSSYLAYKDGKSSYRYMLYAISNHYGSMGGGHYTAFVHQGADRWYDFDDSHVYPISQDKLKTSAAYVLFYRRVEEI

SEQ ID NO: 123 - protein, 601 aa, Nicotiana tabacum
MSRNSLKIHLSIGKIQPGSENKNGSPVYTDSGTCEHLSELRSRVGSNPFFNFRGCVKVRPLGRASIRREPPNELVRCGACGQAPPRLYACVTCAAVFCRVHAPSHPVGNASDPSLHSIAVDIDRAELFCCGCRDQVYDRDFDAAVVLAQTEATVIGSIQDPPPQPENTRKRRRVEYKPWTPDVKEQVLIVGNSSPLPSQLGNDSTTPEVQWGLRGLNNLGNTCFMNSVLQALLHTPPLRNYFLSDKHNRYFCQRKNNSVITRSSSDNGNKNSTMLCLACDLDAMFSAVFSGDWTPISPAKFLYSWWKHASNLASYEQQDAHEFFISVLDGIHERMQNDKGKALSPGSGDCCIAHRVFSGILRSDVMCTACGFTSTTYDPCIDISLDLELSQGSSAKMTSKKSHNTHKKEAESGKFSQNGRISTLMGCLDHFTRPEKLGSDQKFFCQHCQVRQESLKQMSIRKLPLVSCFHIKRFEHSVIKKMSRKVDHYLQFPFSLDMSPYLSSSILRSRFGNRIFSFDGDEQDASCESSSEFELFAVITHTGKLDAGHYVTYLRLSNQWYKCDDAWITQVSESIVRAAQGYMMFYVQKMLYYKASENQVS

SEQ ID NO: 124 - protein, 469 aa, Nicotiana tabacum
MATHSSTLTISISLLLLLFFFFFSTLSSASDMSILTYDENQHFRTDDEVMSLYESWLLEHGKSYNALDEKDKRFQIFKDNLRYIDEQNSVPNKSYKLGLTKFADLTNEEYRSMYLGTKTSDRRRLLKNKSDRYLPKVGDSLPDSVDWREKGVLVGVKDQGSCGSCWAFSAIASVEAVNSIVTGDVISLSEQELVDCDTSYNDGCNGGLMDYAFDFIIKNGGIDTEEDYPYTGRDGRCDQSRKNAKVVTIDGYEDVPANNEKALQKAVANQPVSIAIEAGGHDFQHYVSGIFTGKCGTAVDHGVVAVGYGSENGMDYWIIRNSWGASWGEKGYLRVQRNVASSKGLCGLAIEPSYPVKTGVNPPKPGPSPPSPIKPPTQCDDYAQCPEGTTCCCVFEYYNSCFSWGCCPLEGATCCEDHYSCCPHDYPVCNIRAGTCSISKDNPLGVKAMKHIHAEPIEAFINGGRKSSS

SEQ ID NO: 125 - protein, 361 aa, Nicotiana tabacum
MKKLFLVLFSLALVLRLGESFDFHEKELETEEKLWELYERWRSHHTVSRSLDEKDKRFNVFKANVHYVHNFNKKDKPYKLKLNKFADMTNHEFRHHYAGSKIKHHRSFLGASRANGTFMYANVEDVPPSVDWRKKGAVTPVKDQGKCGSCWAFSTVVAVEGINQIKTNELVSLSEQELVDCDTSQNQGCNGGLMDMAFEFIKKKGGINTEENYPYMAEGGECDIQKRNSPVVSIDGYEDVPPNDEDSLLKAVANQPVSVAIQASGSDFQFYSEGVFTGDCGTELDHGVAIVGYGTTLDGTKYWIVRNSWGPEWGEKGYIRMQREIDAEEGLCGIAMQPSYPIKTSSSNPTGSPATAPKDEL

SEQ ID NO: 126 - protein, 525 aa, Nicotiana tabacum
MARPQFTVILAIISLLIHYGVVSGFRLSDVTNGSSVFLPSPADGSRHTTMLLPLFPPKDTSRRAEISRRHLQKSPASARMSLHDDLLLNGYYTTHIWIGTPPQKFALIVDTGSTVTYVPCSECKKCGNHQDPKFQPEMSSTYQSVKCNKACPCDHKRQQCIYERRYAEMSASYGLLGEDIISFGNLSELAPQRAVFGCEIAETGDLYSQRADGIMGLGRGDLSIVDQLVEKHVISDSFSLCYGGMDFGGGAMVLGGVKPPADMAFTKSDFGHSPYYNIDLKEIHVAGKPLNLNPRVFGGKHGTILDSGTTYAYLPEAAFAAFKNAVVKELHSLKQIEGPDPSFKDICFSGAGSNISELSKNFPRVDMVFSDGKKLTLSPENYLFQHFKVRGAYCLGIFPNGKNPASLLGGIVVRNTLVTYDRENKRIGFWKTNCSELWDRLNLSPPSPPSPSVSSLDNTNSSAHLSPSSAPSGPPGYNTPVEIKVGLITFYLSLSVNCSELKPRIPELAHFIAQELDVNVSQVGF

SEQ ID NO: 127 - protein, 512 aa, Nicotiana tabacum
MGAKSFLVAFFLSLLLFPLAFCTSNDGLVRIGLKKIKFDQNNRLAARVESKEGEALRASFRKYNNLRGNLGASEDTDIVALKNYMDAQYFGEIGIGSPPQKFTVIFDTGSSNLWVPSSKCYFSVPCLFHSKYKSSQSSTYKKNGKSAAIRYGTGAISGFFSQDSVKVGDLVVKNQEFIEATREPSVTFLVAKFDGILGLGFQEISVGNAVPVWYNMVKQGLVKEPVFSFWLNRNTEEDEGGEIVFGGVDPNHYKGKHTYVPVTRKGYWQFDMGDVLIDGQATGYCDNGCSAIADSGTSLLAGPTTVVTMINHAIGASGVVSQQCKAVVEQYGQTIMDMLLAEAHPKKICSQVGLCTFDGTRGVSMGIESVVDENAGKSSGLHDAMCSACEMAVVWMQNQLRQNQTQERILNYVNELCERLPSPMGQSAVDCGKLSGMPSVSFTIGGRTFDLSPEEYILKVGEGPAAQCISGFIALDVPPPRGPLWILGDVFMGRYHTVFDSGKLRVGFAEAA

SEQ ID NO: 128 - protein, 319 aa, Nicotiana tabacum
MVVAFVGIAKSIGQQCLRRSKPYSYSYFSSYVRSSNSKYGLQNWQFQSHRTLILQSASESVKLERLSDSDSGILEVKLDRPEARNAIGKDMLRGLQQAFEAVSNERSANVLMICSSVPKVFCAGADLKERKTMILSEVQDFVSTLRSTFSFLEGLHIPTIAAIEGIALGGGLEMAMSCDIRICGEDAVLGLPETGLAVIPGAGGTQRLPRLVGKSIAKDIIFTGRKISGKDAVSIGLVNYCVPAGEARLKTLELARDINQKGPVALRMAKCAIDKGVELNMESALALEWDCYEQLLDTKDRLEGLAAFAERRKPRYKGE

SEQ ID NO: 129 - protein, 552 aa, Nicotiana tabacum
MCSSNSLYINPKPCKHLADYKVKNGMSGYSLIQECFKTTPYGRTTLEISKSELPRCSICSGHEGRFYMCLICSSVLCCLSPESNHALLHSQCKAGHEISVDMERAELYCSVCCDQVYDPDFDKVVMCKHIMGFPRTEIGVVESELRLSKRRRLSFGMDLDSKNMKTLFLRRDQKSKSCFPLVLRGLNNLGNTCFMNSVLQVLLHAPPLRNYFLSDRHNRDICRKMSSDRLCLPCDIDLIFSAVFSGDRTPYSPARFLYSWWQHSENLATYEQQDAHEFFISVMDRIHDKEGKASLATKDNGDCQCIAHRTFYGLLRSDVTCTSCGFTSTTHDPCMDISLDLNSCNSSPKDFANKSSKPNESLVGCLDLFTRPEKLGSDQKLYCENCQEKQDALKQMSIKKLPLVLSFHIKRFEHSPTRKMSRKIDRHLQFPFSLDMKPYLSSSIVRKRYGNRIFSFDGDESDISTEFEIFAVVTHSGMLESGHYVTYLRLRNQWYKCDDAWITEVDEEVVRASQCYLMYYVQKMLYHKSCEDVSCQPMSLRADTFVPIAGCC

SEQ ID NO: 130 - protein, 318 aa, Nicotiana tabacum
MKELHSLREIEGPDPNYKDICFSGAGSDISELSKSFPPIDMVFSNGKKLSLTPENYLFRHSKVRGAYCLGIFQNGKDPTTLLGGIVVRNTLVTYDRENERIGFWKTNCSELWDRLNLSPSPPPPPLPSGLDNTNSSANLTPALAPSLPLEHAPGKIKIGLVSFDMSLSVDYSALKPRVPELAHFIAQELEVNVSQVHLMNFSTEGNDSLIRWAIFPAGSANYMPNATATEIINRLAENRFHLPDTFGSYKLVKWDIEPPPKRIRWQQNYLVVVFALLVVLIIGLSASLGWLIWRRRQEIPYNPVGSAETHEKELQPLN

SEQ ID NO: 131 - protein, 482 aa, Nicotiana tabacum
MVTVSVKWQKEVYPAVEIDTSQPPYVFKAQLYDLTGVPPERQKIMVKGGLLKDDADWSKVGVKEGQRLMMMGTADEIVKAPEKGPVFAEDLPEEEQVVNVGHSAGLFNLGNTCYMNSTVQCLHSVPELKSALTEYNQLGRSNDLDHSSHLLTVATRDLFNDLDKNVKPVAPMQFWTVLRKKYPQFGQQSNGAFMQQDAEECWTQLLYTLSQSLKSPNSSGSPDIVKALFGIEFDNRIHCAESGEESTETETVYSLKCHISQEVNHLHEGLKRGLKSELEKASPSLGRSAVYVKDSRINGLPRYLTIQFVRFFWKRESNQKAKILRKVDYPLSLDVYDFCSEDLRKKLEGPRQVLRDAEGKKAGLKTSEKTSSSTDGDVKMTEAEESSSGSGEASKTTQEGVLPEKEHHLTGIYDLVAVLTHKGRSADSGHYVAWVKQENGKWVQFDDDNPIPQREEDIPKLSGGGDWHMAYICMYKARVVPM

SEQ ID NO: 132 - protein, 255 aa, Nicotiana tabacum
MEKKKEVIRLERESVIPVLKPRLIMALADLIEHSSDRAEFLKLCKRVEYTIHAWYLLQFEDLMQLYSLFDPVNGAKKLEQQKLSPEEIDILEQNFLTYLFQIMHKSNFKIASDEEIDVAHSGQYLLNLPITVDESKLDKKLLEKYFAEHPHEDLPEFADKYVIFRRGIGIDRTTDYFFMEKVDMIIGRTWAWILRKTRIDRLFSRRSSSRRKKDPKKDDEINSEAEDHDLYVERIRIENMELSARSNQFSLHQVK

SEQ ID NO: 133 - protein, 969 aa, Nicotiana tabacum
MELTCSSPLSVNSTISFNPQLRRYGSVYPHKRCQTVFSLFPYCPSSSSHITITTATTAACSTSSSTSSLFGISLSHRPCSSIPRKIKRSLYIVSGVFERFTERSIKAVMFSQKEAKALGKDMVYTQHLLLGLIAEDRSPGGFLGSRITIDKAREAVRSIWHDDVEDDKEKLASQDSGSATSATDVAFSSSTKRVFEAAVEYSRTMGHNFIAPEHMAFGLFTVDDGNATRVLKRLGVNVNRLAAEAVSRLQGELAKDGREPISFKRSREKSFPGKITIDRSAEKAKAEKNALEQFCVDLTARVSEGLIDPVIGREIEVQRIIEILCRRTKNNPILLGQAGVGKTAIAEGLAINIAEGNIPAFLMKKRVMSLDIGLLISGAKERGELEGRVTTLIKEVKKSGNIILFIDEVHILVGAGTVGRGNKGSGLDIANLLKPALGRGELQCIASTTMDEFRLHIEKDKAFARRFQPVLINEPSQADAVQILLGLREKYESHHKCIYSLEAINAAVQLSARYIPDRYLPDKAIDLIDEAGSKSRMQAHKRRKEQQISVLSQSPSDYWQEIRAVQAMHEVILASKLTENDDASRLNDGSELHLQPASPSTSDEDEPPVVGPEEIAAVASLWTGIPLKQLTVDERMLLVGLDEQLKKRVVGQDEAVAAICRAVKRSRTGLKDPNRPISAMLFCGPTGVGKSELAKALAASYFGSESAMLRLDMSEYMERHTVSKLIGSPPGYVGYGEGGTLTEAIRRKPFTVVLLDEIEKAHPDIFNILLQLFEDGHLTDSQGRRVSFKNALIVMTSNVGSTAIVKGRQNTIGFLLADDESAASYAGMKAIVMEELKTYFRPELMNRLDEVVVFRPLEKPQMLQILDLMLQEVRARLVSLEISLEVSEAVMELICQQGFDRNYGARPLRRAVTQMVEDLLSESFLSGDLKPGDVAIINLDESGNPVVANKSTQSIHLSDANGNPVVTNR

SEQ ID NO: 134 - protein, 339 aa, Nicotiana tabacum
MKNIERLANVALLGLSLAPLVVNVDPNVNVIVTACLTVFVGCYRSVKPTPPSETMSNEHAMRFPLVGSAMLLSLFLLFKFLSKDLVNAVLTCYFFVLGIAALSATLLPAIRRFLPKKWNDDLIIWHFPYFRSLEIEFTRSQIVAAIPGTIFCVWYAKQKHWLANNVLGLAFCIQGIEMLSLGSFKTGAILLAGLFVYDIFWVFFTPVMVSVAKSFDAPIKLLFPTADAKRPFSMLGLGDIVIPGIFVALALRFDVSRGKGPQYFKSAFLGYTFGLALTIFVMNWFQAAQPALLYIVPAVIGFLAVHCIWNGDVKPLLEFDEGKTKGAEEADAKESKKVE

SEQ ID NO: 135 - protein, 497 aa, Nicotiana tabacum
MAFSSSYFSFIFLILLFIISFVVGEIKPIYLPGTYQSSLEKQHVKSKIPFKVHYFPQILDHFTFLPKSSKVFKQKYLINDNYWKQGGPIFVYTGNEGNIDWFAANTGFMLDIAPKFHALLVFIEHRFYGDSMPFGKKSYKSPKTLGYLNSQQALADYAVLIRSLKQNLSSESSPVVVFGGSYGGMLASWFRLKYPHIAIGAVASSAPILQFDKITPWSSFYDAVSQDFKEVSLNCYRVIKGSWTELDALSKHEEGLTEVSKLFRTCKGLHSVYSARDWLWEAFVYTAMVNYPTKANFMMPLPAYPVQEMCKIIDGLPKGASKISRAFAAASLYYNYTKREKCFNLEGGDDAHGLRGWDWQACTEMVMPMTCSNESMFPPSSYSYKEFKEDCKKKYGVEPRPHWITTEFGGYRIEQVLKRFGSNMIFSNGMQDPWSRGGVLKNISASIVALVTQKGAHHVDFRSETKNDPGWLIMQRKQEVAIIQKWLEEYYRDLKQN

SEQ ID NO: 136 - protein, 360 aa, Nicotiana tabacum
MSRFSLLLALVVAGGLFASALAGPATFADENPIRQVVSDGLHELENAILQVVGKTRHALSFARFAHRYGKRYESVEEIKQRFEVFLDNLKMIRSHNKKGLSYKLGVNEFTDLTWDEFRRDRLGAAQNCSATTKGNLKVTNVVLPETKDWREAGIVSPVKNQGKCGSCWTFSTTGALEAAYSQAFGKGISLSEQQLVDCAGAFNNFGCNGGLPSQAFEYIKSNGGLDTEEAYPYTGKNGLCKFSSENVGVKVIDSVNITLGAEDELKYAVALVRPVSIAFEVIKGFKQYKSGVYTSTECGNTPMDVNHAVLAVGYGVENGVPYWLIKNSWGADWGDNGYFKMEMGKNMCGIATCASYPVVA

SEQ ID NO: 137 - protein, 492 aa, Nicotiana tabacum
MEKEHKYSLFLTKLKLFFLVTLSTFHGLSHGFQMDQARTLMSWRRSKMHAQTTTYATNEDETENLVFSDEKHVGNMEDDLIKDGLPAQPSNVMFKQYAGYVNVDVKNGRSLFYYFAEASSGNASSKPLVLWLNGGPGCSSLGFGAMLELGPFGVNPDGKTLYSRRFAWNKVANVMFLESPAGVGFSYSNTTSDYSKSGDKRTAEDAYRFLVNWFKRFPHYKGRDFYIMGESYAGFYVPELADIIVKRNMLPTTNFYIQFKGIMIGNGIMNDETDEKGTLDYLWSHALISDETHRGLLQHCKTETETCQHFQNIAEAELGNVDPYNIYGPQCSINSKSRSSSPKLKNGYDPCEQQYVQNYLNLPHVQKALHANLTNLPYLWNPCSNLDWKDTPATMFPIYKRLIASGLRILLYSGDVDAVVSVTSTRYSLSAMNLKVIKPWRPWLDDTQEVAGYMVVYDGLAFATVRGAGHQVPQFQPRRAFALLNMFFANHS

SEQ ID NO: 138 - protein, 538 aa, Nicotiana tabacum
MANSYTSINFFLAPIIFLAILGLQLQSSDGFGTFGFDIHHRYSDPVKGILDLHGLPEKGSVEYYSAWTQRDRFIKGRRLAEADTANSTPLSFSGGNETFRLSSLGFLHYANVTVGTPGLSFLVALDTGSDLFWLPCDCSNCVRALETRSGRRINLNIYSPNTSSTGQIVPCNSTLCGQRRRCLSSQNACAYGVAYLSNNTSSSGVLVEDILHLETDNAQQKSVEAPIALGCGIRQTGAFLSGAAPNGLFGLGLENISVPSMLASKGLAANSFSMCFGPDGIGRIVFGDKGSPAQGETPLNLDQLHPTYNISLTGITVGNKITDVDFTAIFDSGTSFTYLNDPAYKVITENFDSQAKQPRIQPDGEIPFEYCYGLSANQTTFEVPDVNLTMKGGNQLFLFDPIIMLSLQDRSGAYCLAVVKSGDVNIIGQNFMTGYRVVFDREKMVLGWKPSDCYDSRGSNDKSTTLPVNKRNSTEAPSPSSVVPEATKGNGSGNEPATSFPSVQSSKPAANQAPAHFICQLMMALFSLFSYYLIIISS

SEQ ID NO: 139 - protein, 473 aa, Nicotiana tabacum
MAIHTSTLSISILVMLMFSVVSSSAAEDMSIISYNEKHHTNGESTVWRTDDEVMSLYESWLVEHKKVYNALGEKDKRFQIFKDNLRYIDEHNSVPDKSYKLGLTQFADLTNEEYKSIYLGTKPDGRSRLLNTQSDRYAPKVGDSLPDSVDWRKKGVLVDVKNQGQCGSCWAFSAVASIEAVNKIVTGNLISLSEQELVDCDTSDNQGCQGGLMDDAFKFVIQNGGIDTEEDYPYKAKDGKCDQARKNARVVTIDGYEDVPDNDEKALKKAVAGQPVSVAIEAGGKDFQHYKSGIFTGKCGAAVDHGVVAVGYGSENGMDYWIVRNSWGASWGEKGYLRMQRNIGNPKGLCGIATIASYPVKTGQNPPKPAPSPPPVKPPTQCDDYNECPAGTTCCCVYEYYKYCFAWGCCPMEGATCCKDHNSCCPHDYPVCNVKAGTCSISKNNPLGVKAMQHILAKPIGTFGNEGKKSPSS

SEQ ID NO: 140 - protein, 473 aa, Nicotiana tabacum
MEIKILLASLVIWYITCINVYADDMVRIELKRQSLDLSSISDARIYAKDLRGRNRNLAAPNDQIVYLKNYHDVQYFAEIGIGSPPQRFIVVFDTGSSNLWVPSSRCFFSIACYLRSRYKSRLSNTYTKIGKSSKIPFGTGSVHGFFSQDNVKVGGAVLKQQVFTEVTREGYLTLLRARFDGVLGLGFDQSTTSRNVTPVWYNMLLQHMVTKSIFSFWLNRDPTSKIAGEIIFGGMDWTHFRGQHTYVPVAQNGYWEIEIGDLFIGSNSTGLCKDGCPAIVDTGTSFIAGPTTILTQINHAIGAEGIISLECKKVVSSYGDSIWERLIAGLQPENVCNRIGLCTNNGSLCSSCEMIVFWIQVEIRKERSKEKAFQYANQLCEKLPNPGGKSFINCDVFALPHITFTIGDKSFPLSPDQYVIRVDDSQGVHCISGFTTLNAHPRRPLWVLGDAFLRAYHTVFDFGSSQIGFAESA

SEQ ID NO: 141 - protein, 774 aa, Nicotiana tabacum
MASIFALSLFFIIISFCITSITIPVQSDGHETFIIHVSKSDKPRVFATHHHWYSSIIRSVSQHPSKILYTYSRAAVGFSARLTAAQADQLRRIPGVISVLPDEVRHLHTTHTPTFLGLADSFGLWPNSDYADDVIIGVLDTGIWPERPSFSDEGLSPVPSSWKGKCATGPDFPETSCNKKIIGAQMFYKGYEASHGPMDESKESKSPRDTEGHGTHTASTAAGSVVANASFYQYAKGEARGMAIKARIAAYKICWKNGCFNSDILAAMDQAVNDGVHVISLSVGANGYAPHYLLDSIAIGAFGASEHGVLVSCSAGNSGPGAYTAVNIAPWILTVGASTIDREFPADVILGDNRIFGGVSLYSGDPLTDAKLPVVYSGDCGSKYCYPGKLDHKKVAGKIVLCDRGGNARVEKGSAVKQAGGVGMILLNLADSGEELVADSHLLPATMVGQKAGDKIRHYVKSDPSPTATIVFRGTVIGKSPAAPRVAAFSSRGPNHLTPEILKPDVIAPGVNILAGWTGSVGPTDLDIDTRRVEFNIISGTSMSCPHASGLAALLKRAHPKWTPAAVKSALMTTAYNLDNSGKVFTDLATGQESTPFVHGSGHVDPNRALDPGLVYDIETSDYVNFLCSIGYDGDDVAVFVRDSSRVNCSEQNLATPGDLNYPSFSVVFTGESNGVVKYKRVMKNVGKNTDAVYEVKVNAPSSVEVSVSPAKLVFSEEKKSLSYEISFKSKSSGDLEMVKGIESAFGSIEWSDGIHNVRSPIAVRWRHYSAASI

SEQ ID NO: 142 - protein, 498 aa, Nicotiana tabacum
MPSSLFLTLLLASISLSFSSTLNSNDDEFFLSSTPKFPLTMAEKLIRQLNLFPKHDINKAAATGDSEQRLFERKLNLSYVGNSGSTVQDLGHHAGYYRLPHTKDARMFYFFFESRSRKNDPVVIWLTGGPGCSSELAVFYENGPFKIADNMSLVWNDFGWDKVSNLIYVDQPTGTGFSYSSNDDDIRHDERGVSNDLYDFLQAFFKAHPQYAKNDFYITGESYAGHYIPAFASRVHQGNKNKEGIYVNLKGFAIGNGLTDPEIQYKAYTDYALDMKLIKKSDYNAIEKSYPKCQLAIKLCGKDGGTACMAAYLVCTSIFNKIMDIAGDKNYYDVRKRCEGDLCYDFSKMETFLNDQQVKKALGVGDIEFVSCSSEVYQAMQLDWMRNLEEGIPSLLEDGIKLLVYAGEYDLICNWLGNSRWVHAMKWSGQKAFGKATQVSFAVDGVEKGVQKNYGPLTFLKVHDAGHMVPMDQPKAALEMLHRWMQDKLSKQGHLAPM

SEQ ID NO: 143 - protein, 438 aa, Nicotiana tabacum
MLVISDCYINSCKAFNFVINLPVMGHSHSHSSHSHSHFHSSKSSDDQNMDMGESITTQTDVSFMLAKHVFSKEVKGDSNLVFSPLSIQIVLGLIAAGSKGPTKDQLLCFLKSKSIDELNSLYSHFVSVVFVDGSPNGGPRLSVVNGVWIDQTLPFKPSYKKVVDKVYKAASNSVDFQCKAAEVANQVNQWAKMKTNNLIKEILPHGTVNNMTRLIFANALYFKGVWNDKFNASETKDHKFHLLSGGSIKAPFMTSKNKQYAVAFDGFKVLGLHYKQGKDMRRFCMYLILPDARDELPALLDKISSEPGFIDHHIPFEKAKMRKFLIPKFKTTFGFEASKVLKGLGLTLPFSSGGLTEMVDSPLAGRLFVSQIFHKSFIEVNEEGTEAAAVTASVIMTKSLIIEKEMEFVADHPFLFLIRDESTGAVFFIGSVLNPLAG

SEQ ID NO: 144 - protein, 593 aa, Nicotiana tabacum
MLRIGPSLRTARKLLNRNLHFQSPIIAGDVAPVHHRRQELHRFVRRCNYSSTVGNTSASASFFSTLNNSNSSTTSTTPHVERAEENDSLQSNASEVEPVAAVEQRLSSGMVDAYLAIELALDSVVKIFTVSSSPNYFLPWQNKSQRETTGSGFVIRGKRILTNAHVVADHTFVLVRKHGSPTKYRATVQAVGHECDLAILVVESEEFWEGMNSLELGDVPFLQEAVAVVGYPQGGDNISVTKGVVSRVEPTQYVHGASQLLAIQIDAAINPGNSGGPAIMGDKVAGVAFQNLSGAENIGYIIPVPVIKHFIAGVEERGEYIGFCSLGLSCQPTENAQIREYFQMQSKLTGVLVSRINPLSDASRVLKKDDIILSFDGVPIANDGTVPFRNRERITFDHLVSMKKPNETAELKVLRNGKVHDFKITLHPLQPLVPVHQFDKLPSYFIFAGLVFIPLTQPFLHEYGEDWYNASPRRLCERALRELPKKPGEQFIILSQVLMDDINAGYERLAELQVKKVNGVEVLNLKHLRQLVEDGNQKNVRFDLDDEKVIVLNYESARIATSRILKRHRIPHAMSSDLTDDENAVELQSACSS

SEQ ID NO: 145 - protein, 536 aa, Nicotiana tabacum
ICREPPNELVRCGACGHAPPRLYACVTCAEVFCRVHAPSHPAGNAADPSLHCIAVDIDRAELFCCGCRDQVYNSDFDAAVALAQTEATVIGSIQDPPPHPESTRKRRRVEYKPWTPDVKEQVLIVGNSSPLPSQLGNDSTTPEVQWGLRGLNNLGNTCFMNSVLQALLHTPPLRNYFLSDKHNRYFCQRKNSSVITRSSSDNGNKNSTMLCLACDLDAMFSAVFSGDRTPISPAKFLYSWWKHASNLASYEQQDAHEFFISVLDGIHERMQNDKGKALSPGSGDCCIAHRVFSGILRSDVMCTACGFTSTTYDPCIDISLDLELSQGSSSKMTSKKSHNTHKKEAESGKFSQNGRISSLMGCLDHFTRPEKLGSDQKFFCQHCQVRQESLKQMSIRKLPLVSCFHIKRFEHSVIKKMSRKVDHYLQFPFSLDMSPYLSSSILRSRFGNRIFSFDGDEQDASCESSSEFELFAVITHTGKLDAGHYVTYLRLSNQWYKCDDAWITQVSENIVRAAQGYMMFYVQKMLYYKASEKQVS

SEQ ID NO: 146 - protein, 458 aa, Nicotiana tabacum
MEGSPVLGEHAELIGVLSRPLRQRATAAEIQMVIPWEAITSACGSLLKEELQTRRKIHFDNGNLISVKNESPSNNIRNGPSNDTREHLLIDPVPPSLIEKAMTSICLITVDDGAWASGVLLNKQGLLLTNAHLLEPWRFGKTSVNGSGYNTKSDVVLIPSDQSEHPGVEKFDIQRRNKHLIQKELKTPHFLVDNEQGSFRVNLAKTGSRIIRVRLDFMDPWVWTNAKVVHVSRGPLDVALLQLELVPDQLCPITADFMCPSPGSKAYILGHGLFGPRCDFLPSACVGAIAKVVEAKRSLLNQSSLGEHFPAMLETTAAVHPGGSGGAVVNSEGHMIALVTSNARHGGGTVIPHLNFSIPCAALEPIFKFVEDMQNLSLEYLDKPDEQLSSVWALTPPLSSKQSPSMLHLPMLPRGDSDGDTKGSKFAKFIADSEAMLKSATQLGKVERLSNKLVHSKL

SEQ ID NO: 147 - protein, 268 aa, Nicotiana tabacum
MLKALTSSCLQNRFHAVTTAFTPQVRRGTDSNTPLLRVLGSLRSSNRRGPYLSRRFFCSDSTDGSESNSEAAASEAKPAEKGGDADSKASAAIVPTVFKPEDCLTVLALPLPHRPLFPGFYMHIYVKDPKVLAALLESRKRQAPYAGAFLMKDEQGTDPNVVSASDTEKNIYELKGKDMLNRLHEVGTLAQITSIKDDQVILIGHRRIRMTEVVSEEPLTVKVDHLKEQPYNKDDDVIKATSFEVLSTLRDVLKTSSLWKDHVQTYIQ

SEQ ID NO: 148 - protein, 511 aa, Nicotiana tabacum
MERKHLWAALLLLAIACFVFPASSDSLLRISLKKRQLDISSLNVANVARLEDRYGKHVMKDIEKKKKKKKSDTNSDIVSLKNYLDAQYYGDISIGSPPQNFTVIFDTGSSNLWVPSSRCYFSIACWIHSKYKARKSSTYTKKGESCSIHYGSGSISGFLSQDNVQVGDLVVTDQVFIEATRESSVTFIVAKFDGILGLGFKEIAVGNTTPVWYNMVKQDLVKEPVFSFWLNRDINAKEGGELVFGGVDPKHFKDKHTYVPLTQKGYWQFKMGDFSIGNQSTGFCEGGCAAIVDSGTSLLAGPTAVVTQVNHAIGAEGVLSMECKETISQYGEMIWDLLVSGVTPDQICLQVGLCYLNGAQHLSSNIRSVVEKENEGSSIGEAPLCTACEMAVIWMQNQLKQKTTKESVLEYVNQLCEKLPSPMGQSVIDCNSISSMPNVTFNIGDKDFVLTPDQYILKTGEGIATICLSGFVALDVPPPRGPLWILGNVFMGVYHTVFDYGNLQLGFAEAA

SEQ ID NO: 149 - protein, 357 aa, Nicotiana tabacum
SRSYYNILLLQYLFLFVMALILGWKILFILLFVIIGMCTSQVTSRNIQALSMLEKHELWMSSHGRTYKNEAEKEKRLNIFKENVKFIESFNNNGTKKPYKLGINAFADLTAEEFLSYYTTGLKLSNSYSQIQSSFKYENLSDVPSVMDWRKSGAVTRIKHQGQCGCCWAFSAVAALEGANKLSTNNLISLSEQQLLDCTTENNGCNGGLMTTAYDFIIQNGGIATESNYPYEEYQDSCKSQEMNSAVKINRYETLPSTESALLKAVAKQPVSIGIAVNEDFHLYQNGVYNGNCEGQELNHAVTVIGYGTENDGTKYWLIKNSWGTSWGENGYMKIARDTGIEGGLCGITTLASYPVL

SEQ ID NO: 150 - protein, 754 aa, Nicotiana tabacum
MGLPEVVDVARNYAVMVRIQGPDPKGLKMRKHAFHLYNSGKTTLSASGMLLPSSFVNASVSKQIQGESKLHSFGGHFLVLTVASVIEPFVVQQDRGDISKDKPELIPGAQIDILWEGGNTLQNDIKVTNKEGLNWLPAELLRVVDIPVSSAAVQSLVEGSSSSIEHGWEVGWSLAAYGNSRQSFTNTKRTQVEKISFPSQTPMMEAQSSLPSVIGTSTTRIALLRVSSNPYEDLPALKVATWSRRGDLLLGMGSPFGILSPSHFFNSISVGSIANSYPPSPQNKALLIADIRCLPGMEGSPVLGEHAELIGVLSRPLRQRATAAEIQMVIPWEAITSACGSLLKEELQTRRKIHFGNGNLISVKKESFSNNIQDGHANDTQEHLQIDPVPPSLIEKAMTSICLIAVDDGAWASGVLLNKQGLLLTNAHLLEPWRFGKTSVNGSGYNTKSDVVLIPSDQSEHPGVEKFDIQRRNKHLIQKELKTPHFLVDNEQCSFRVNLANTGSRTIRVRLDFMDPWVWTNAKVVHVSRGPLDVALLQLELVPDQLCPIIVDFMCPSPGSKAYILGHGLFGPRCDFLPSACVGAIAKVVEAKRPLLNQSSLGGHFPAMLETTAAVHPGGSGGAVVNSEGHMIALVTSNARHGGGTVIPHLNFSIPCAALEPIFKFAEDMQNLSLEYLDKPDEQLSSVWALTPPLSSKQSPSMLHLPMLPRGDSDGDTKGSKFAKFIADSEAMLKSATQLGKVERLSNKLVHSKL

SEQ ID NO: 151 - protein, 884 aa, Nicotiana tabacum
MDNPSEDSSDSPQQQPESPVNDDQRVYLVPYRWWKEAQESSPSDGKSVTLYAAAPAPSYGGPMKIINNIFSPDVAFNLRREEESLSQSQENGEVGVSGRDYALVPGDIWLQALKWHSNSKAAAKNGKSFSATDEDIADVYPLQLRLSVLRETSSLGVRISKKDNTVECFKRACRIFSVDTEPLRIWDLSGQTALFFSDENNKILKDSQKQSEQDMLLELQVYGLSDSVKNKVKKDEMSMQYPNGSSFLMNGTGSGITSNLTRSSSSSFSGGPCEAGTLGLTGLQNLGNTCFMNSALQCLAHTPKLVDYFLGDYKREINHDNPLGMNGEIASAFGDLLKKLWAPGATPVAPRTFKLKLAHFAPQFSGFNQHDSQELLAFLLDGLHEDLNRVKNKPYVEAKDGDDRPDEEIADEYWNNHLARNDSIIVDVCQGQYRSTLVCPVCKKVSIMFDPFMYLSLPLPSTSMRSMTVTVIKNGSDIQISAFTITVSKDGRLEDLIRALSTACSLDADETLLVAEIYNNRIIRYLEEPADSLSLIRDGDRLVAYRLHKGTEEAPLVVFTHQQIDEHYIYGKLTSNMKTFGIPLAAHSRVLTGSDIRSLYLQILTPFLVHNTAQADNLNCDRSATEACTDSEVITDMEPGNSIVNGVPESIAEEDTAEPLDMEFQFYLSDDKATFKGSEIVMNEPLQSTDISGRLNVLVSWSPKILEQYNTGLFSSLPEVFKSGFFAKRPQESVSLYKCLEAFLKEEPLGPEDMWYCPACKQHRQATKKLDLWRLPEILVIHLKRFSYNRFLKNKLETYVDFPTHDLDLSSYLAYKDGKSSYRYMLYAISNHYGSMGGGHYTAFVHQGADRWYDFDDSHVYSISQDKLKTSAAYVLFYRRVEEI

SEQ ID NO: 152 - protein, 449 aa, Nicotiana tabacum
MASSSRVFVLLLLIIFNFLYISAQKTIKHKPFSMSFPLISTSLSHNSSSKALFLSSFMASNNRRQTQNTKTMSRIPSLNYKSTFKYSMALIVTLPIGTPPQNQQMVLDTGSQLSWIQCHKKIPKRPPPTTSFDPSLSSTFSVLPCTHPLCKPRIPDFTLPTTCDQNRLCHYSYFYADGTLAEGNLVREKITFSRSQSTPPLILGCATESEDAEGILGMNLGRFSFASQAKVQKFSYCVPIRQGSHAVKPSGTFYLGQNPNSHTFQYINLLTFPQSQRMPNLDPLAFTVGMVGIKIGGKKLNISGRVFRPNAGGSGQTIIDSGTEYTFLVEEAYNKVREEIVRLVGPRLKKGYVYGGALDMCFDNRPIEIGRLIGDMTLQFENGVDILINKERMLDEVEGGIHCVGIGRSESLGIASNIIGNFHQQNLWVEFDMRNRRVGFGKGECSRQV

SEQ ID NO: 153 - protein, 784 aa, Nicotiana tabacum
YTIIIFSLNMKIFSIFSLLLLLLLPILASCHEKQVYIVYFGGHKGEKALHEIEENHHSYLMSVKESEEEARYSLIYSYKHSINGFAALLTPHEASKLSELEEVVSVYKSEPRKYRLQTTRSWEFSGVEESVQPNSLNKDNLLLKARYGKDVIIGVLDSGLWPESKSFSDEGLGPIPKSWKGICQSGDAFNSSNCNKKIIGARYYIKGYEQYYGPLNRTLDYLSPRDKDGHGTHTSSTAGGRKVPNVSAIGGFASGTASGGAPLARLAMYKVCWAIPKEGKEDGNTCFDEDMLAAMDDAIADGVDVISISIGTKEPQPFDQDSIAIGALYAVKKNIVVSCSAGNSGPAPSTLSNTAPWIITVGASSVDRAFLSPVILGNGKKFTGQTVTPYKLEKEMYPLVYAGQVINSNVTKDVAGQCLPGSLSPKKAKGKIVICLRGNGTRVGKGGEVKRAGGIGYILGNNKANGAELVADPHFLPATAVDYKSAMQILNYINSTKSPVAYIVPAKTVLHSKPAPYMASFTSRGPSAVAPDILKPDITAPGLNILAAWSGGSSPTKLDIDDRVVEYNIISGTSMSCPHVGGAAALLKAIHPTWSSAAIRSALITSAGLRNNVGEQITDASGKPADPFQFGGGHFRPSKAADPGLVYDASYQDYLLFLCASGIKDLDKSFKCPKKSHLPNNLNYPSLAIPNLNGTVTVSRRLTNVGAPKSVYFASAKPPLGFSVEISPPVLSFKHVGSKRTFTITVKVRSDMIDSIPKDQYVFGWYSWNDGIHNVRSPIAVKLA

SEQ ID NO: 154 - protein, 974 aa, Nicotiana tabacum
MATRRSSSSALTALAASRSRLLSRFRPAVSRLSQNTLLGTGRCPPPNSGFFVAETTAALWPNYNVLSKSFVHSYSTTAASSGQINNMDYTEMALEGIVGAVEAARTSKQQVVETEHLMKALLEQKDGLARRIFTKAGLDNSSVLQETDQFISQQPKVVGDTSGPILGSHLSSLLENAKKHKKEMGDSFVSVEHMLLSFLSDTRFGQKLFRNLQLTEKALKDAVNAVRGSQRVTDPNPEGKYEALEKYGNDLTELARRGKLDPVIGRDDEIRRCIQILSRRTKNNPVIIGEPGVGKTAIAEGLAQRIVRGDVPEPLMNRKLMSLDMGALLAGAKYRGDFEERLKAVLKEVSSSNGQIILFIDEIHTVVGAGATSGAMDAGNLLKPMLGRGELRCIGATTLNEYRKYIEKDPALERRFQQVYCGQPSVEDAISILRGLRERYELHHGVKISDSALVSAAVLADRYITERFLPDKAIDLVDEAAAKLKMEITSKPTELDEIDRAVLKLEMEKLSLKNDTDKASKERLNKLESDLKSLKAKQKELNEQWEREKDLMTRIRSIKEEIDRVNLEMEAAEREYDLNRAAELKYGTLISLQRQLGEAEKNLADYRKSGSSLLREEVTDLDITEIVSKWTGIPLSNLQQSERDKLVFLENELHKRVVGQDMAVKSVADAIRRSRAGLSDPNRPIASFMFMGPTGVGKTELGKALAAYLFNTENALVRIDMSEYMEKHAVSRLVGAPPGYVGYEEGGQLTEVVRRRPYSVVLFDEIEKAHHDVFNILLQLLDDGRITDSQGRTVSFTNTVVIMTSNIGSHYILETLQNTRDSQEAVYDAMKKQVIELARRTFRPEFMNRIDEYIVFQPLDLKQVSRIVELQMRRVKDRLKQKKIDLHYTQEAISLLANMGFDPNYGARPVKRVIQQMVENEVAMGVLRGDFSEEDMIIVDADASPQGKDLLPEKRLLIRRIENGSNMDAMVAND

SEQ ID NO: 155 - protein, 857 aa, Nicotiana tabacum
VNVKCFFVSFFFSFSCMSLFFLQGWNFETFCLKTQSFAVTNKNHRPHLHSHHSSFLCFHTSYLLFFLILYIYIAKTTSRFAKTQQPPQKMSRFTMLVVLVLLLLCLCHLSVATIGSSSNKKSTYIVHVAKSQMPESFENHKHWYDSSLKSVSDSAEMLYVYNNVVHGFSARLTVQEAESLERQSGILSVLPEMKYELHTTRTPSFLGLDRSADFFPESNAMSDVIVGVLDTGVWPESKSFDDTGLGPVPDSWKGECESGTNFSSSNCNRKLIGARYFSKGYETTLGPVDVSKESKSARDDDGHGTHTATTAAGSIVQGASLFGYASGTARGMATRARVAVYKVCWIGGCFSSDILAAMDKAIDDNVNVLSLSLGGGNSDYYRDSVAIGAFAAMEKGILVSCSAGNAGPGPYSLSNVAPWITTVGAGTLDRDFPAYVSLGNGKNFSGVSLYKGDLSLSKMLPFVYAGNASNTTNGNLCMTGTLIPEKVKGKIVLCDRGINPRVQKGSVVKEAGGVGMVLANTAANGDELVADAHLLPATTVGQTTGEAIKKYLTSDPNPTATILFEGTKVGIKPSPVVAAFSSRGPNSITQEILKPDIIAPGVNILAGWTGGVGPTGLAEDTRRVGFNIISGTSMSCPHVSGLAALLKGAHPDWSPAAIRSALMTTAYTVYKNGGALQDVSTGKPSTPFDHGAGHVDPVAALNPGLVYDLRADDYLNFLCALNYTSIQINSIARRNYNCETSKKYSVTDLNYPSFAVVFLEQMTAGSGSSSSSVKYTRTLTNVGPAGTYKVSTVFSSSNSVKVSVEPETLVFTRVNEQKSYTVTFTAPSTPSTTNVFGRIEWSDGKHVVGSPVAISWI

SEQ ID NO: 156 - protein, 979 aa, Nicotiana tabacum
MLKALTSSCLQNRFHAVTTAFTPQVRRGTDSNTPLLRVLGSLRSSNRRVPYLSRRFFCSDSTDGSESNSEAAASEAKPAEEGGDADSKASAAMVPTVFKPEDCLTVLALPLPHRPLFPGFYMHIYVKDPKVLAALLESRKRQAPYAGAFLMKDEQGTDPNVVSASDTEKNIYELKGKDMLNRLHEVGTLAQITSIKDDQVILIGHRRIRMAEVVSEEPLTVKVDHLKEQPYNKDDDVIKATSFEVLSTLRDVLKTSSLWKDHVQTYIQHIGDFNYARLADFGAAISGANKLQCQQVLEELDVHKRLQLTLELVKKEMEISKIQESIARAIEEKISGEQRRYLLNEQLKAIKKELGLETDDKTALSAKFRERLEPNKEKIPVHVMQVIEEELTKLQLLEASSSEFNVTRNYLDWLTALPWGNYSDENFDVLRAEQILDEDHYGLTDVKERILEFIAVGKLRGTSQGKIICLSGPPGVGKTSIGRSIARALNRKFYRFSVGGLSDVAEIKGHRRTYIGAMPGKMVQCLKSVGTANPLVLIDEIDKLGRGHAGDPASAMLELLDPEQNANFLDHYLDVPIDLSKVLFVCTANVVEMIPNPLLDRMEVISIAGYITDEKMHIARDYLEKATRETCGIKPEQVEVTNSALLALIENYCREAGVRNLQKQIEKIYRKIALKLVREDGEIEPQNAEVGEVEAESIHLSDEIKSKEEIQAGAESANGSNDDKASENNAEAEAQGAPVNQTQKSANEDACLQDTQETEKATESEASKTVNKVVVDSPNLADYVGKPVFHAERIYDQTPVGVVMGLAWTSMGGSTLYIETSLVEQGEGKGALNVTGQLGDVMKESAQIAHTVARTILQEKEPDNQFFANSKLHLHVPAGATPKDGPSAGCTMITSLLSLAMKKPVKKDLAMTGEVTLTGKILPIGGVKEKAIAARRSDVKTIIFPSANRRDFDELAPNVKEGLDVHFVDDYKQIFDLAF

SEQ ID NO: 157 - protein, 483 aa, Nicotiana tabacum
MQFFRRNPSLHRISSRFLNQVVKTSAYSTKKVYNAGQPTAATHPQLMKEGEITPGITSEEYMQRRKKLLEFLPENSLAIVAAAPIKMMTDVVPYNFRQDADYLYITGCQQPGGVAVLGHDCGLCMFMPEQSPQDALWQGETAGVDAALQIFKADLAYPINRLPQILSRMIESSSTVFHNVKTRTSSYLELEAYKKAVSNYKVKDFSVYTHEARFVKSPAELKLMRDSASIACQALVQTMLYSKLFPDEGMLSAKFEYECRVRGAQRMAFNPVVGGGPNGSVVHYFRNDQKIEDGNLVLMDVGCELHGYVSDLTRVWPPFGKFSSVQEELYNLILETNKECVELCRPGTTIREIHHYSVETLRRGFKEIGILKNDRRGRYEMLNPTNIGHYLGMDVHDCSTIGNDRPLKPGVVITIEPGVYIPSCFDCPERFQGIGFRIEDEVLITESGYEVLTASIPKEIKHLESLLNNFGSGRGTEIRAALS

SEQ ID NO: 158 - protein, 477 aa, Nicotiana tabacum
LLTSHKNHIILLPFLLYKIFISLQKQTLMASSTRVFVLLLLIIFNFLYISAQKTIKHKPFSMSFPLTSTSLSHNSSSKALFLSSLLASNQRKQAPNTKTVSRIPSLNYKSTFKYSMALIVTLPIGTPPQNQQMVLDTGSQLSWIQCHKKIPKRPPPTTSFDPSLSSTFSVLPCTHPLCKPRIPDFTLPTTCDQNRLCHYSYFYADGTLAEGNLVREKITFSRSQSTPPLILGCATESEDAEGILGMNLGRFSFASQAKVQKFSYCVPIRQGSHAVKPSGTFYLGQNPNSHTFQYINLLTFPQSQRMPNLDPLAFTVGMVGIKIGGKKLNISGRVFRPNAGGSGQTIIDSGTEYTFLVEEAYNKVREEIVRLVGPRLKKGYVYGGALDMCFDNRPMEIGRLIGDMTLQFENGVEILINKERMLDEVEGGIHCVGIGRSESLGIASNIIGNFHQQNLWVEFDMRNRRVGFGKGECSRQM

SEQ ID NO: 159 - protein, 764 aa, Nicotiana tabacum
MAALNFFIIFTSLVLPIASDPLLSTYVVHVDTKAKPSHYLTQDEWYNSVVESVLANKMDSDSTSPRLFYSYDVVLQGFAARLTDQESEKLNKFPEVIHIFKDQSRIKLDTTRSPNFLGLNTGYGLWPQSNFGDDVIIGLVDTGIWPESESFKDNGIGPIPTRWKGKCVDGIEFNATSSCNRKLIGARNFVKGVENDYHHQSARDQNGHGTHTASTAAGTEVNGANVFGFAKGKARGIASKARIAMYKACGSSSCAESDILAAIESAIKDGVDILSLSLGYDDAPFYENPVAIATFAAVKRNIFVASSAGNLGPYPFSVHNTAPWVTTVGAGSLDRDFPVEINLSNNKTFVGSSLYPGRISGKSYSLVYIENCSIMTIDRSKVERKIVVCNTSKIEALRNGILIQKAGGFGLIQLNLPTEGEGIRAMAYTLPSATLGYKEGIELLSYIKSNANPRAGFVRRKDTVIGKKVRAPIVASFSSRGPNVVVPEVLKPDLIAPGLNILAAWPGDISPTRLKMDPRRVKFNINSGTSMACPHIAGVAALVRAVHPDWSPAAIKSALMTTSTAFDNAQLPIIKHEDMELATPISIGAGHVNPESAIDPGLIYDTDTSDYINLLCSLNYTEKQMKLFTNESNPCSGFTGSPLDLNYPSLSVMFRPDSYVHVVKKTLTHVAVSKPEVYKVKIVNLNSEKVSLSIEPRKLIFNESLQKQSYVVKFESHYAFNSSRKIAEQMAFGSILWESEKHNVRSPFAVMWVQQNFNNSRLYK

SEQ ID NO: 160 - protein, 662 aa, Nicotiana tabacum
MEISKIQESIARAIEEKISGEQRRYLLNEQLKAIKKELGLETDDKTALSAKFRERLEPNKEKIPVHVMQVIEEELTKLQLLEASSSEFNVTRNYLDWLTALPWGSYSDENFDVLRAEQILDEDHYGLTDVKERILEFIAVGKLRGTSQGKIICLSGPPGVGKTSIGRSIARALNRKFYRFSVGGLSDVAEIKGHRRTYIGAMPGKMVQCLKSVGTANPLVLIDEIDKLGRGHAGDPASAMLELLDPEQNANFLDHYLDVPIDLSKVLFVCTANVVEMIPNPLLDRMEVISIAGYITDEKVHIARDYLEKATRETCGIKPEQVEVTDSALLALIENYCREAGVRNLQKQIEKIYRKIALKLVREDGEIEPQNAEVDEVKAESIHLSDEIKSKEEIQAGAESANGSNDDEASENNAEAEAQGAENQTQKSANEDTCLQDTQETEKATESEASKTVNKVVVDSPNLADYVGKPVFHAERIYDQTPVGVVMGLAWTSMGGSTLYIETSLVEQGEGKGALNVTGQLGDVMKESAQIAHTVARTILLEKEPDNQFFANSKLHLHVPAGATPKDGPSAGCTMITSLLSLAMKKPVKKDLAMTGEVTLTGKILPIGGVKEKAIAARRSDVKTIIFPSANRRDFDELAPNVKEGLDVHFVDDYKQIFDLAF

1. A mutant, non-naturally occurring or transgenic tobacco plant cell comprising:
(i) a polynucleotide comprising, consisting or consisting essentially of a sequence encoding a functional protease and having at least 96% sequence identity to any one of SEQ ID NO:1 to SEQ ID No: 80;
(ii) a polypeptide encoded by the polynucleotide set forth in (i);
(iii) a polypeptide comprising, consisting or consisting essentially of a sequence encoding a protease and having at least 96% sequence identity to SEQ ID NO:81 to SEQ ID No: 160; or
(iv) a construct, vector or expression vector comprising the isolated polynucleotide set forth in (i),
and wherein the expression or activity of said protease is modulated as compared to a control tobacco plant cell in which the expression or activity of said protease has not been altered.

2. A mutant, non-naturally occurring or transgenic tobacco plant cell according to claim 1, wherein the expression or activity of said protease is upregulated compared to the control tobacco plant cell.

3. A mutant, non-naturally occurring or transgenic tobacco plant cell according to claim 1, wherein the expression or activity of said protease is downregulated compared to the control tobacco plant cell.

4. A mutant, non-naturally occurring or transgenic tobacco plant cell according claim 1, wherein the expression or activity is modulated of a protease selected from:
at least one of SEQ ID NO: 1 to 16; or
at least one of SEQ ID NO: 30 to 41; or
at least one of SEQ ID NO: 17 to 22; or
at least one of SEQ ID NO: 42 to 44; or
at least one of SEQ ID NO: 45 to 61; or
at least one of SEQ ID NO: 62 to 80 or
at least one of SEQ ID NO: 23 to 29.

5. A mutant, non-naturally occurring or transgenic tobacco plant cell according to claim 4, wherein the expression or activity of a protease selected from at least one of SEQ ID NO: 30 to 41 is modulated in an Oriental type tobacco.

6. A mutant, non-naturally occurring or transgenic tobacco plant cell according to claim 4, wherein the expression or activity of a protease selected from SEQ ID NO: 17 to 22 is modulated in a Virginia type tobacco.

7. A mutant, non-naturally occurring or transgenic tobacco plant cell according to claim 4, wherein the expression or activity of a protease selected from at least one of SEQ ID NO: 42 to 44 is modulated in a Burley type tobacco.

8. A mutant, non-naturally occurring or transgenic tobacco plant cell according to claim 4, wherein the expression or activity of a protease selected from at least one of SEQ ID NO: 45 to 61 is modulated in a Virginia or Oriental type tobacco.

9. A mutant, non-naturally occurring or transgenic tobacco plant cell according to claim 4, wherein the expression or activity of a protease selected from at least one of SEQ ID NO: 62 to 80 is modulated in a Burley or Oriental type tobacco.

10. A mutant, non-naturally occurring or transgenic tobacco plant cell according to claim 4, wherein the expression or activity of a protease selected from at least one of SEQ ID NO: 23 to 29 is modulated in a Burley or Virginia type tobacco.

11. The mutant, non-naturally occurring or transgenic tobacco plant cell according to claim 1, wherein said mutation(s) is a heterozygous or homozygous mutation.

12. The mutant, non-naturally occurring or transgenic tobacco plant cell according to claim 1, wherein the expression of one or more proteases is increased by about 10% to about 1000%.

13. The mutant, non-naturally occurring or transgenic tobacco plant cell according to claim 12, wherein the expression of one or more proteases is increased by at least 10%, at least 20%, at least 25%, at least 50%, at least 100%, at least 200%, at least 500%, at least 750% or up to 1000%.

14. A mutant, non-naturally occurring or transgenic plant or component or part thereof comprising the plant cell according to claim 1.

15. Plant material including biomass, seed, stem, flowers or leaves from the plant of claim 14.

16. A tobacco product comprising the plant cell of claim 1, at least a part of the plant of claim 14 or the plant material according to claim 15.

17. A method for preparing a tobacco plant with modulated levels of protease, said method comprising the steps of:
(a) providing a plant comprising (i) a polynucleotide comprising, consisting or consisting essentially of a sequence encoding a functional protease and having at least 96% sequence identity to at least one of SEQ ID NO:1 to SEQ ID No: 80;
(b) inserting one or more mutations into said polynucleotide of said tobacco plant to create a mutant tobacco plant; and
(c) curing the tobacco plant material.

18. The method according to claim 17, wherein the tobacco plant in step (b) is a mutant tobacco plant, preferably, wherein said mutant tobacco plant comprises one or more mutations in one or more further sequence encoding a functional protease and having at least 96% sequence identity to at least one of SEQ ID NO:1 to SEQ ID No: 80.

19. A method according to claim 17, wherein the genome of a cell of a tobacco plant is modified by a genome editing technology or by genome engineering techniques selected from CRISPR/Cas technology, zinc finger nuclease-mediated mutagenesis, chemical or radiation mutagenesis, homologous recombination, oligonucleotide-directed mutagenesis and meganuclease-mediated mutagenesis.

20. A method for producing cured plant material, preferably cured leaves, or flowers with an altered flavour profile as compared to control plant material comprising the steps of:
(a) providing the plant material according to claim 15;
(b) optionally harvesting the plant material therefrom; and
(c) curing the plant material for a period of time such that the levels of at least one protease are modulated compared to control cured plant material.

21. A method for the modulation of the expression or activity of one or more proteases in tobacco during a tobacco curing procedure, comprising:
inserting into a tobacco plant one or more of:
a polynucleotide comprising, consisting or consisting essentially of a sequence encoding a functional protease and having at least 96% sequence identity to any one of SEQ ID NO:1 to SEQ ID No: 80;
(ii) a polypeptide encoded by the polynucleotide set forth in (i);
(iii) a polypeptide comprising, consisting or consisting essentially of a sequence encoding a protease and having at least 96% sequence identity to SEQ ID NO:81 to SEQ ID No: 160; or
(iv) a construct, vector or expression vector comprising the isolated polynucleotide set forth in (i); and
curing plant material from the tobacco plant.

22. A method according to claim 21, wherein the curing comprises a procedure selected from the group consisting of air curing, fire curing, smoke curing and flue curing.
